United States Patent Application Publication US 2026/0275333 A1 - sequence listing, part 8

SEQ ID NO: 3045 - RNA, 64444167 nt, Homo sapiens (residues 15,036,974-17,185,112 of 64,444,167)
  source 1..64444167: mol_type = mRNA
tcttttagaactataaaaattatgtttttaataagttttttattaaaaattggtctttttatgagactaattacaaagattaaagtctcctgcttagcttatctgtggtttgagtagctccagtagctcgatgggttagtgtgcagtggtacttatgcggtggcactttcatgacatgtggtttgccctctgaagctttgtgatctttcactgcattccaatactagaaataacatctttacatttttactctaagtcagttgccgccttgggaaatcaacttgtttttaggtgcttggttccctaagagggatatgaggagagtagataattttagtagttattaatgagaaatcctcaaaagccatacttttttaaattcttgtttttgaaacatttctggcacgataatacaggttgagaattaaaaacaagttttctcatttggcatgtttaagtgaagtcacttgcccagagcaggtactgctgtttatggcctcgcctgaatgtttgtggtacaactctttaggatgatgcttctgccaggactgtcacatgtacatgatttcaaatgtgctggcattttagtcagtgtattggagatagagtcttaaagcggctggaagagaacaatcttccttactttgattactttctctctctttaacactacctcatgcctttacttttaactattttaactttaactctttttttttttgaaccagacttgatgacaatccaggttgcaaattttagttttaccatgtattagctgtatgaacatgttagtttcctcatctataaaatggaaattttaatctatacctcacaaaacaatcaagagtaaatgaattacaattagacaggaggactaagggctactgttctatagcacagtatgagagtatagtaaataataatttattgtatatttcaaaatagccagaagagagaattttggatgttctcactacaaaaaaaaatgagaaatgcttgaggcaatggatgtgccagttaccctgatttgattattatacactgtatacatgtatcagaatatcatatgtattacataaatatgtacaattatgtgtcaattagaaattgtaaaaagggtaataaatgagataatgtatttaatgtgcttagaatatatgccacctagctaataacattattagcacataagaaataatcatatagttcttttacatcgtttcttaattctttggtatgatcgaaaatagaaattataagatttcaaactgcatttatatctctggataatttttacttcaaaactaggttatgtacatgattaacttttatttccaaccatttcaagaaaagaatatggagtaaaatcttatttataaaggaggaaatgaggtcttctggttgtaaatgacgttttatttacaacctggggacagcttccaatttattcagcaaggaattctttccaaaagttttttgatgtgagcagtgtatttatcttgtgctctgtttctggcccctgttattggttgtggccaagaaattataaaatataggatgaatctatcaggaactttgtgagtgtgaatggccagaggccacctgtccatgtgtgtgactctgctatggctgattcaacaatgcagcaaaccccagcagtttcagtagttccacaccttccgcttgttattaaggggtgacgttcaatgtgctcatgaggacgaggtcaggcctggcccaacctggaggccaggtgatggtccctagttggatgatctgaagacatcttttgatgcagtttgggttgaggaaggcaagagatgtattgatgctatcataggagtgaatcaggtgaggtaaaggcaaggaaacatgatatgaagtagaactggattcattataatatatgtgtgatttagtcacacaaatataccggcaaagaatgtcaagtgttaatcaaataggtcaactaataattgagggccaggcaaaggcaagccactgtcagggcaaagaagtgatacttttatctcaccccttatagagtccatggctgacacccctgtaacaaaggacctaataggagaaaagcataacaaatttatttaataaagttttatgtgacctgagagctttcagacacaaagaaccaaagacccagggaaaactgtgtttttttaatgcttaggactgatgaagaaaggacagtcacacagaaatgtgattggacaaaaagggtataatttgatgttaatgaagtataggagagaacctagcaaagcttgtttgttcacattcttcttggcctctctgtgtagcattcctttgccctggttatggggcaagacacctggcacaagaagcttatgacctgatcttaggggaggtaggtcagagagtaaccttttctaggttttatggctttctttggggaagaggagttgtagtttctatgacacaccttggtggagaaagggaatgggagaaaggagggcaaaggaaggttggagagaccttgcttttgaagcccttccagtctcctttacttcaaagtattctgcatggccaggtgccatacttcatggtattgtttaatgagccctgacatcacttaacaaaccacagtggcagatttcaagggatgttgtcagggagagtgggagaggagagtgtgatagacaactaaacagaaagcgactctacagcttgctaagggaagaagagagggaagcattaaatgagaaatcaactggagacagcaggtacttacggagacagcagatacttttagagacagcagatatttatagctggcgtcctacaccagggtttactttcatcatcccttttgttttcaaaactaagggtcatttttttcaacacaatgtcattatcagaacctagttgttgtaaagttttggatgctcccaaagtttctggagaggtaggtgtctgagtccttgcttccttccacaccttccacttgttattaaggggtcgacgttcaattacttagtggcatttattaccccaagatttctataagtgtcctcttggatgtgaagcattgttcatatatgaggggaaaagcaggtctttttgctgggaaccatatagaggtgatctcatagctttgaagtaccttgattggctaacacggtgacaccctgtctctactaaaaatacaaaaaattagccaggtgtggtggcacatgcctgtagtcccagctactagggaggctgaggcaggagaatggtaagaacccaggaggcggagcttgcagtgagtcgagatcgcgccactgcactccagcctgggcgacagagcgagactccgtctcaggaaaaaaaaaaaaaaagtaccttaatgcagcccctctcaatagtgtatttggctgggtccactccttccttttacttcccagatttagcttaattatggtgacaatggtttactctctctccattccccaccctgtttcctaatgttctttagccaagggctttgtagaaggactatgtttctaccagtggtatgtcactgaagtgggctattgaggtgaccaattaggacaaaggtgaggagtgtcttcaggggggtctttatctcatgtttcattcccttgtatggattgctgcttcctctacctttttggattgccaattccccatgtctacttttcttctatgggtttaacatagtgttttctctgaccctatcggaacattgttcagcagatggctttatataaagttattttgtttgctattaagcatcttagctatgctcaatgttttggggctgaattgttcattgtggcaatttgtaatatttgtaatatatttaagtaactctagagtcttggcttttaacattctcattcaattatgagggtcaggtcttgatctgaactatgtgtttatggccttttctcaactccttgtatagagatagttttccagaagtattaatgattgattgaagcagataaaatcttttatgttttcattcttttggaactcactttttggtggaaatacttgcaattcaactaatttactggtatgacttgttatatggattcttgacatgatgattggtttttataaatttgagctgtatttactcacttccatgaattgtgcagttatgaaaatttgaatctgctagtttctgatctccatttgtggaagaaaaagccaataaatgggaaagttattttaattctataatgctacatctagaaagggcgtgacaaatttttgtttgtaatacagttcccagtcattggaaggggacatctcttggtctgagtaatattcttcataatattaacacctgctcaatattgagcaaaacttcaattgcccacttctggccatatatccaactttagaaagtcatgtacttctagattttatagaagaatactacttctagattttgatttttttaaattaatttctctctctctctctcttacttttttgagacagggtctcactctgtcacccaggatgaagtacagtggcatgatcatggcttactgaagcctcaagttatcctcccacctcagtctcctgagtagctgagaccacaggcatgtaccaacacacccatcacacccatctaaatttttaaacattttttgtagtgatgggatctccctgtgttgcccaggctggtctcaagctcctgggctcaagtgatcctcctgcctcggcctcccaaagtgctgggattacaggtgtgagccaccacacccaaactgaattttttaatttatatttttcagatttgttactgtacccttcttgccattgagtacttaatttctccatcattgtttcttggagttttaatatcgaaatgcttcattatattgttcaataatgcagaatgtttgaatttaacatagagatttttaggcccataggctgaaataagtcatcaaaagatggaaaaacatatggtgatgaggcatgtcatacatgccaagcaggattggaggaagctggagaacttgaagccattcagggacaagaagattagcgagaggatttcaaagaagtttggagccccaagtcataagaaataaacacatgattccttatctcagactttactagtgaaagaaaaaataaaaaacaagctctctttcctagggatataaattatcctatgacaaatagaaagtgaaattctgtaggttattttcataacagaccttccagagaatttgctgatgactggaaaaggggaaaatgcaggaaaaaaaaggtataaatcctaagagtttctaaagtagccaaacaaggcaggaaaatgtctaatcttattgtgcaaaagggaggtggaatctgtgtggaagaaacagtaatataaaaataatggtacatgttctcatctgtgtaatgctcaatcatttccagtatgccctcacctggccacctgtaggagtatagcatcctacagcagaatgggacgtgtgtttggctgaggcctgactctcgccccttatagtttatgacaagagtattggggccaagcagggaagaaacatggaagaaacatctcattctagggcccacagtgaattatggccactgccgggacagagccagaatcatctcaggataggtatcttttacccacagatttctgcctcaggattgtggatgaacttgaaggtccctgtcttagcacctgaaattccatcagcagaagctcagcgtgccatagtttgcatagaacagaagcaggaaatcttaatgatgaactctacttacatccctttaatgggatcatggaactggtaggcaagaagcctagattgtatcttgcaaatttagagccaaatcttactgaaaggaatgagggaatatagatgagtagtgactactttatttttctacaacactgtttcctttttgagtcctgattctgctgacatggcacggaactttaagctcaatggtttaggtgtttctttcccttcctggggttgtatcaacattcctggaagtttgtgtggaactaggcctgggtgaaagggacccagctgttccttgaacctaagtctgctttgctgtgtccttcattcctatctatgtggcctctcaggtctagcaaacctcctgctgctttggtggcttgcttagggcatagtaagccactaggactccatgtttctatgaccaggcagtggactgaatttgttccacagacgcattttatttagcccacaaagttttaagaatctggaaattttatttgaataatgtagttttcagatttctcttgaaaaatgggaaatactgtaactcagtgcctgcattcttgcataggagcagccagctggctggggctgtgcctttgcatagggcattgctgtgcctttgcatggggcattggctctccaggcccacacaggcccctccagtgtccattggattccacctagcttccttcacccacttgagttttttgcatgatgcctccacgctgcacacccacattctctctctggagtttgtccctctctgagtggcttcttttgaaagattgtcttgggcccctgtactcctgggccttcagatcttcctttacttatcgcctcttcccttttctctttcccccagtcaaaaagaagcttttgcagtctgggcatggtggagaggagctcttttcattcactgtgcttctctctaacactttgtctgtacccctgattatggcctccacttcagatgccagtcacacatccaggcttcccgtatttctgaccaaccagctgatcagaggttcccacgacactctcctcgggtttgatattttattagaatggatcacagaactcaggaagacactttacttaatatgaccaatttattacaaaggacacaattcaagaatggccagacagaagagatgcatggggcagaaagaggcatgaagcttccaaaccttctctgggagcgccacactccttgtacctgcatgtgctcagcacccctgaaactctctgcactccattgtgtagggtttttatggaggtgtcattaaataggcatgattgattaagtcattggcctttggtgattgaattcaatctacagcctatctcccctccatggaggttggaaggtggggctgaaaggtgccaaccctctcatcacatggtcggatcctctggcaaccagacctcatcctgaagctatttaggggcccatcaagagtaatcctattagcataatctcaggtgtggttaaagagccttattatgaataaccaaagaggttcttcttactcctatcactcaggagcttacaagagttttagggagctctgtgccaggaactggggactgaatatatatttgttatatcacactatcagttttgaaattcaaaatggcacaatcaagattattcctgttttctcccttaacacactccttctctgagtcaatgagtacatctgtgcggagtgtctcccatttgccctccagacccactcttcccatctttcccattctctctgcctggagagctgatctgtatggactgtctcaatggacttctctgccttctggcttctttttgggtttggtcaatgggcagctctcccaggcagtctaaggtaaagaggagagtaaaggtgaggtgtttgctttttgtgattgtctacatgtgctgggaactacactttcttttcaagccttttggcttgaaaatgttaacagtgcctgcttgctaacttcagggaatgtcactagctctgggggttgctacagccttcccacatctttgtaaatagtctctattaaacactcaaattactctgtttgaaagtgccatttatttcctcttgggactctcacagataaaacgttatgtgcagttgtttatccatagaaatatttaataatatttatacagattttaagttttgtctaaaaatacattcaatgttaaaatgcagcatctgaaccttatgtcaatgtaagagttttctacaaaacagtcatatgtggttcaaaacacaagaggctgaattgaagctttttaactcctacatcacaaccttttaacacacaaggaatcctgagtgcaccagtttctaagagaacctaacagtactaaagatgatctagaaaaagaaaagaaaagaaaagaaatggggatgaattgtctgaggaagaattgtcagtaacaagttcatcatggccgtcaccctgcagaagaccctaatcagaaaacacagcttcacgcagctaaatttttaatgctcttctaaataatgtctgaggttagaatgtcagcttgggaatcccaaacatccagtaaaatgggacacctttgccacctctgtgagagtgttctgaccttgtctgtgtttttctccccttcagttcactcagcaacacagggaggtgagtaaaggatttggcagcacatttgaggcccgggggagaaagagtgcttgcaggcatgtctccacgttgcgcggaaaacatgatgtttagctgttgaaactattgtgaaacttggctttcttccttagtttgcctttttaataaattcctaaatcatgatttgattcataaattacaaatatatggtgtttgtacatgtgaaatacaagatcataaccatggagaaaggccaccattacccatagatttttaatcaaacaaattggtttattctgatgtttctctgataatttctctccagaccagggtttttttttttttttttttttttttccctttctgataacacaccacacttttggactatctacacaaatagctatgaaaaatggccttgttataactgagggaacttcattatattgaagtgctttttgaaaaatattctaaaatatgaaaactggccatccgaacaggagagcagtatttctgagggtgttctgctggctcgcctctccacgtctgacctgtcttctttgtgagctctgaatcttcctgtcacctcttcaacagcagtgtgttctgcaagtccagccttctcctctctgtggcgtcctttcggagatcatctgtacgctcaaggcttcagttaattacttgaataatgtatatatttaagcatcttcttcgcctttttctcttctgttttaggtcttctcagactcctcctagaacaatatagaataaatgccacataaggtaaaaattaaaaaatacatatatatatataagaaattcaaataaactgttttgtaaaagtaagagacaacatatggatcagtaatttaaaaatatatctccgaaccttcccacatgatgacttctaaagctataactcttacctcgtagtctcttttgaacataagttttgcaaaaagaatggtccccaaaaccaaaacatttcacgcacatgttcttccattaccgcagatttaccatgaccaagattaaacccaatgagaacatcttcctaccaaaaccctttagacggtctgtttctgtctgtgacacaattactcccagtaaacaagtgtcacgtctgtgtttttgcacatgtgtacctaggtatgtgtgcgcacacacacatgcatgtatgtattaagaaaggagttagtgtttattgttttaaccccacttcttactctggctgtccgttcccagtcagtttcaaatcttggattcttcttttgaaatgactcttaaagtcccccttcttctccattccagttgtgtttcttttaatcccaggctacagtcccctcacttctggactatcacaacacctgtccagttggcctctctgtctactctttccacgcctaggttataaattactcagttgtagctattatacctcataactttctgttccttgactttgctaatgctttccttctgaaaaggaatttattaatctgggctgttggtcctgttcctcttaacattttgtcaactatacttcaattacttgcatctgattaacagctgctgtgactttccctaaagtagaacatatttctttatgtctctttgataactcactgcattcattggttgcccttggctgaaaagcacattgcttatcaatgtgttttgttcacaatgatctggcagcccaagcatgatatttaatgtaattgatgtctcttatttactaatggatgttacatcatcattatttagaaaatttgctactgaattgacatctgattgaggatacgtgattgaggttaagagcctgtgaatgtttggagaatacttgtttatagtatgtactgtgcagtgtggtgtgctatctacaggctgcagctggcgtttccttctgttaatattctgtacttgatgtggctaagtaggcactgagatgctcaacttcagtgtttcctcctacctactgaaggacaaaacacttactggcagcaatcatctgatgcaatgtaagtaagaatgaaaaaaatacaggacacttatggaattatataagataaaaattagtatgatacacccatatttttaactcatttgtgtcagggtagttttaaatgaaagtgttattctaaatatggagaatctaaagatctatgtagttttaataatttattataagagaacttgagttagaggctttggagtgtcagtcattaaagtttactaattattctagccaccctgcccctccaattctgggtatatggtaagactgcatttactggagctcttctgattggacagagtttacaaccagttttacccactgagttgtgagtagcagtggctaaggcttttattacagtgtgattaggtttcctttgctttcattgcaacgtgatgaggtttcctttgcttttattacaatgtgatgaggtttccattgccaccatggctagcaatgatcttcacagtggctattctgtcagcctgggacccacagtgaagacattatggaacagagtttagccacctgtcactagacatgaacaagaaaaaagaaatacataatttttttaaagggctgggcatggtggctcacacctgtaattccagcactttaagaagccgaggcaggcagatcacttgaggccacgagttcaagaacagcccggccaacatggtgaaaccctgtctctagtaaataaataaataaataataaaaaattagccaggtgtggtggtgggtgcctgtagacccagctgctcaggagactgaagcatgagaattgcttgaacccaggaggcagacgttgtagtgagccaagatcagattgtgccactgtactccagcctgggtgacagagcaagactccatctcaaaaacaaacacacaaacaaacaaagcttcgtggtttgaagccactgatatgtaaaggagttttgttaccactgcataacctagtccctcctgacagatacacttggtgtgattctggttatctctttgactgtttcatctcatgtaggttacttaatcctctcattctttttacttttctgtaaaaaaaaaaaatgagtatagtatctacgtgcctaccttacagggttattataaagaccagattagataatgatgtatgtgaacgtgttacacaaataaatatacatacatataaaatatcattattattttctatgcaatcagataaacttctccagtaatgaactatagaaacgattcctgaaagagtagcctttaaaatattatttttaagtggtattcatttttggagcttaaaaatggttcttcattttaaacataatttatgctggtgctaagtctaaagcataaagaaggataaatgtataagaaaaatctttcacctcaacatacccccatccacattctcaattatagatgtgcctactgttaaaaatttcttatgaataatcatagcagtatttttaatacataatgtttttcaacattgttctgtcacttaacagtatattttgaacatttttctcattttttttctttttaatggtttcatgatactctactggataaatgaacagtgcattatatactttttcaatcaaaattttctttttaaaatttttctttgaaaaaatgaataacccttatcacttaacacagcttaaattattttttttaatgtccaaaagaaagaacattataggaacagatataatacatgccactgtctttgtgatgggaagtaaaaacaggataatagtaatatttatgatgtggaatgataaacagtaatgcctatagagatcagggagataaattagtaaaatcagagatgtgggctaaggaaaagcattgcaaggagagagaagggtaggaagggaaagaaagagggagaagaagaaagagaagagggagggagaggaagagaaaaaagaggagagagacttgttgccaccaagaaaatacatgtctttctaaaggcagctgctactcagctgaagtccactgttttcaataacaattctatctcatcattggcaaatattatttttcaagagaagtaaaaaaaaatcaatatatgtatgattttgattatttaaagtgagaagctaaatcagaaactttatttttaatgcataagccaaattacatttgttatttggggcaaccagatatagtcaaggcatagtgtgctaccctctaagataaaaaatataatacaggcacagagttttaacgtgtcttaaagaatatagctacatgaccgggtgcgttggctcatgcctgtaatcccagcactttgggaggccgaggcaggcagatcacctgaggttaggagttcaagaccagcctggccaacatggtgaaaccctgtctctactaaaaatacaaaaattagctgggcatggtggcaggcacctttaaccccagctgctcgggaggcagaggcaggagaatcgcttgaacccaggaggcggaggctgcagtaagccaagattgtgccactgcactccagcctggatgacagagtgagactctgtctcaggaaaaaaaaaaaaaaaagaatatagctgcatattttggtcttgtcttcataatctacctgtgtttcataccatagaaagcttcctgcctctaagcatgttttcataaacctacacaaccagcttcagttagcagaaatccttaagaaacaatattttagtgtaattttatttccagtctgtcttgtgctctaaagctcttaacaatcatacaaaaggagcttttgatgattctctctttgacttgccatttaccacctctttccatatcagaaatcaaagtggaattatgcatgttaatatggttgtaatttgactttcatatggtactgactaaaaagcactcaatacagcataccacattggtgtaaaagcaaatattttattaaagaattttgaaaagcacataatttatctccatacttttttcataattgattagttgtacaacatgcattttgataaattcaattacaaaataaaaatactcgatactcatatataaaaagtaacataattttaacatttttgtctatttacattggatgtttaacactgttgtctttttacactttctatttaggtcttttttttttttttttttttttttttgagatggagtcttgctccgttgcccaggctggagtgcagtggcatgatcttggctcactgcaagctccgcctcctgggttcacgctaggtttcttcttaaatgacctaaatgacatgagagatgcaggctgcagacattttttaaagtagtgaaatgcttgctctagagagtgtttttaagcctaggttgctttaattaataaaacttgtcatatatctcaaagaagggaaggtatgtgaaaaaaaaaaaaattcatccctgatgtaaggttgaatgcataattatttatacatatatgtaaattagaataaagatgactcttggttgactcaaagggtgttcaaaattggaagttattcttttatggaaggattttattataaaatgtaaaattatggttgaacaaagaggttttgttccatttggttatacatgctgagaaaattcttcatttttttaataagtctgaatatctcctttccaaacttggtaattttctggagtctaataataactgaaatccctttttaaaaacctgccaagagaacccacttttctgtctgatttaactaatgtaagtattagatttaatctgtttagttagggaaaaattagtttgtgaccgcaaatggctgtctgcattagttatatccaaatgaacagagtcatttttggaacattttttgatatccatttttcgtttacttggctagtttcccccaactttatcagttagggttcacagagtagttctacagaaccagaaatcagtaggagatgtgtgtgtgtgtgtgtgtgtgtgtgtgtgtgtgtgtgtgtgtgtgtgtgtgtgtgtgtgtcatagcagctgacagatccaaaatccgtagaactggggactggcaagcttaaactccatagggcaggcaggacagcgggaaacaccctggcagtggccgaagccgcagtctacacatgaaatttcctcttcttcaggaaaacctcagttttgctcttaaagcctttcagctgagtagatgaggcccactcagatcatcaagtataatctcctccacttcaagttaactggttgtagatgttaatcacatcaacaaaatagtttcagagctgcatcttggttagtgtttaattgaataactgagtactaaagtcttgccaaattgacacatacaactagccattataccatctctttttttttttttttttgacggagtctttctctgtccccgccaggctggggtgcagtgacgcaatctcagctcactgcaacttccacctcccaggttcaagccattctcctgcctcagcctgtcgagtagctgggactacaggcacgcgccactacgtccagctaattttttgtgtttttagtagagacagggtttcaccatgttggccaggatggtctcgaccttttgaccttgtgatccgcccgtcccggccttccaaagtgctgggatcacaggtgtaagccactgcgcccggccggcctataccatctttttataatcttcaaggaattttcttaaatcacctgactgagttccttctctgtgctcattctgtgcttgctgcattcatctgtcttgtaatttacaacaccatattaaggctagatatttatatgtttgtcacggtcctcaaactgtgtgtgctccttgaggttccagggaattagccatctatctttgtgttctctgtgcctagtgtgatgggtggcatatacaggcatcgcttgttttattgtgttttgctttattgtgctttgcagatattgtgtctttttacaaattgaaggtttgtggcaaccttgtattgagcaagcctattggcaccactttttaaagagcatgtgctcactttgtgctcctgtgtcacattttgataattctctcaatatctcaaacttttttgttattcttatctattttatagtgatccgtagtcagtgatctttgacattactattgtcattgttttggggtgccacaaactgtgctcataaaaggtcacaaacttaattaatcaatgtgtgtgctccgactgctccactgacctgtcattcccctgtctgtctccctctcctggagcctccgtattccctgagacatgacaatattgaaaccgagccagttaataactctacaatggcctttaagtgttcaagtgagagaaagaattgcaggtttatgttaaatcaaaagctagaaatgattcggcttagtgcggaaggcatgttgaaagcagagacagccaaatgctaggcctcttgtgccaaatagccaagttgtaaatgcaaaggaaaagttcttgaaggaaattaaaactgctattccagtgaacataagaatgataagaaagtgaaacagctttatgggagatatggagaaagttttagtggtctggacagaagatcaaaccaggcacatttccttaaaccaaaccctaatccagagcaacgccctaactctcttcagttctgtgaagtttgagaaagctgaagaagctgcagaagaaaaataggaagctagcagaggtcggttcctgagatttaatgaaagaagccatctctgtaacataaaagcgcaggtaaagccgcaagtgctgatgtagaagctgctgtagccagttatccagatctagctaaatttactgatgagcgtggctataccaaatgacagattttcaacgtagatgaaacagcgttatattggaagaagatgccacttgggatgttcatcactagaaaagagaagtcataggttggcctcaaagcttcaaagggcaggctgagtctattgttaggagctaatgcagtgggtgactttaagttgcagccagtgctcattggccattttggaatttctatcgtccttaagaattatgctaaatctactcttcctgcactctataaaaggaacaagaaagcctggatgacagcacatctgtttacagcatggttaactgaatattttaagcccactgttaagacctactgctgattaaaaaaaaaagattattttcaaaatattatcgcttattaacaatgcatctggtaacccaagagctgtactggagatatacaaagagattggcattgattatgcctgctaatacaacattccttctgcagcctatggatcaaggagtaagtatgactttcaagtcttattatttaaagaatacattttgtaaggccatagctgccatagatagtgattcctctgacaaatctgggcaaagaacattgaaaaccttctggaaaggattcaccattctagatgttattaaaaacatttgtggtttatgggaggaggacaaaatatcaacatgaacaggagcttggaagaaattgatttcaactcttatggatgactttgagaagtttaagagttcagtggagaaagtaactgcaaatgtggtggaaatagcaagagaacttgaattagaattggagcctaaagatgtgactgaattggtgcactcttgtgatgaaacttgaatggatgagggaattgcttcttacggatgagcaaagaaactggtttattgagatggaatctgctcctgatgaagatgctgtgaacattgttgaaataacaacaaaggatttagaatattccgtaaatttaattgataaaagtagtggcagggtttgaaaggattgaccctgatttttaaaataaattctactgtgtgaaaaatgctattaaatagcattgcatgctacagagaattttttgtgaaagagtcagttaattggctaacttctttgttgtcctattttaagaaattgccacagccaccccagcctcagcaaccaccaccctgatcagtcagcagccatcaccatagaggcaagactccccactatcaaaaaaatttcagctcactgaagactcagatgattattagtgttttttagtaataaagtattttttaaattaaggtaggtacattattttttagatataatgctattgcacccttaatcagctacagtatactacacacacaactttgatatatactagggaataaaaaaatgtgtgtgactcattttattgtggtggtctggaattgaacatgttaatattgctgagatatgcctgtattaggtgctcagtaacagcactccactgtagtacaaaatgtcatttaccacattacagagggagaatagatcacatttagcaccttagcttacctatacccacaacttttttttgttttgttttgagatggagtctcactctgtcacccaggctggagtgcaatggcatgatctccgctcactgcaacctccgtctccaggttcaagtgattcacctgtctcagcctcccaagtagctgagattacaggcttgtgccgccacatctagcttttttttttttttttttttgagatggagtttcactcttgttgctcaggctggagtgcaatggtgtgatcttggctccctgcaacctcttcctcctgggttcaagtgattctcctgcctcagcctcccaagtagctgggattacaggcgccttccaccacacccagctaatttttgtatttttagtagagacagggtttcgccatgttggccaggctggtcttaaactcctgacctcaagtgatccgcccaccttggcctctgaaagtgctgggattataggcatgagccaccacacctgggctatacccacaaattttgaataagatatataatgtaaattttaagggcatggtaatataatacaaacaaatcatcaggagtgaggattcctggtttttaattccaatccaggacctaaccggctggctgtgtttcagttcacccatcaatctctgggtcttggttttctcatctaaaagcatgaaggttgagtgagattattgtctctggttcagaagtggcctaatggtttacaagaagactgaacagatgtattttctccccctctttcttcaaatgcattgaaatgacagtgaagaattatagcggagaacaaatacatgacaggaaggtaaattgggaggcggggatgggaagggaggatcatcagaccagagttatgaatttaatttttgattaaggagaatggatggaatattgtaatggataatattaagtggaacaaggtttagcccagagtatatttaggaggaggctaaatgcaagggctactgtcagaattgccagcttctggaagctggattgggtggagggacagaaagcaacatcttttttttttttttttgagatggagtctcactctgttacccaggctagagtgcagtggcgccatctcggctcactgcctcctgaattcaagccattctcctgcctcagcctcccgagtagctgggattataggcgcccaccaccatgcacagctaatttttgtatttttagtagagacaaggtttcaccatgttggccaggctggtctcgaactcctgacctcaagtgatccgcctgcctcggcctcccaaagtgctgggattacaggcgtgagccacagcacctggccgaaagcaacatctttaaagtctacttgacagctgcaagacagcacccgaccccctcctctgtatgcagactaactggaagtctgacatttatggccaggtaaaacacagagcactcttctctcatgaaattagaggagctgagggagctaagcatttctaaagtggatgccagcaacccaaagataacttcgcctcgtcctggctatttgtgggaaacctcagttcaacagcttcttcatctttcagggtgaagtgaaatctgccagtttacatgccttgccccaagcactcagagctcccggcgagactcctgttaactagactgatgagttttttgactaaatgcttcattttccaccctcccttgcagctgaccatggtcatgtgattagattctggccagcagtatgtagacagcagtaatgttcacagctgttaggtgaagcccttgaagagatggcacgtttctttccccttccactcaaactacttggttcaacagtaaataactttaacatggtcccaattgtgtaaatttagctgtttaaaaaaaaaaagtttggaatcaatcaagggataatgtaaggaagactaaatcatggttataggacaaaatttaaatattttaaatgaaaaagaaatggtaaaactaaaataacctgtgaagagtcaaatatcatgtgtaactgatgtaacagcaaagagatttttaagtatatgattgacatgtatgatcacaacaacaaataagaactaatcatataactttcagatatcaggagaaacagataggagtggagatggggatagtaaaaataagttgtaactttgttaatagaagccaaaataaatttaaaaactagaagcctaagttcatcacaaagagttatgtggttacctgaccaacccgaaacagaagctgtttaagatgattgtctctggagaattaaatggaattgaggatgggatatatgagtcagagacttgtgtgtctcattttatgccctaccatatatattttttaaaaaagtgtgtgtgatagctttatatgatatcaataatgacgataaattacatagccatgctttaaaataatgccatcctaattttattaaagtaacttttctttacatgataggatatatgtacatgtagtatgtcaatttaattccctccattttattccaggactgccttccttaagtgttttctgtgttagaggatattttcaggaaaagcaagtgtaaagtaaacatttctccttggttattaaaaagttctaaagcccatcactagttgggatgctgtcctccctgtggtcatcagaataattcagagatcagattattctggtttatgtggcttgttctgggcaaatgagcaggccaagctgcatctcaagggttggccaacttctcagaggccatatatggccttctactcagaagacttctcctgcatataactacaaatcctttcccatcccaccttgcaaccatgacactaaccgtattgcattatgtatgtttatgtatattatgcattgggacataggtgagctcagctaggccatgacatcccacagttgagacaggtttgcttagaaagcaggtgtctgggtgtgaacatttgtgtgtcccattaactgccattcccgatccattatatcaatttcttcccttcccctgtagtctttcatccttggagcctggctcaggggattcatgggacagaaaagacaggatcggaatcagaatgttcttttttttgatctctcactgccccttacgttttattcagtgcagatagtttttccctgcccctaaatgaaaacttgatttgtctatgactttcctgttgatcctgagatagtaaaataccctgtcgcttggcagacaatcatggtctcaatttagaatttataatatcaagtcatgtgtgtcagaattctgaagttgatttaaagttcactttttctttctttcaccttgtctgaggcctgctatggaccggctgctcgacgtaggggaagggcatagtctttctactttctttttataccaaccatgtctcctccattagcttgaaaactgaagtttgtgattttactagggggagtcaaaaaaaggttaaagggggacagatgtagaaaagttcttatttgaaagctggcttcatgctcttacagtttcttcatagactgtcccccaaccccagcaaccccaatacctggtgatctgtcccttgcaattcttttgacctggggggttgtgttctatcttgtcactcattttcttctcaatagggttgccagatacaatacaggactctcaatcaaacttcaatatgagataaataatattgtcttagcataagtacatcccaaataatgtatggaatatacttatcctaaaaaattatttgttgtttaactgaaattcaaatttaactaggcatactgtatttctatttgctaaatctggcaactgtaggtagaagatgtttttcagggatgtctgcttttttgggccaaccaaatctggatatttaattatgctatgctctactactacaacattatttttccatgtcaagcaccttttcacaaatataacatcttaaaagagcttcgtagagcaactgaatatgttataaacttttccttctttttaaaaatgtaaccatctgtccaaaactgtaactcaaatgttaaacatttagtacattaaaaaaattatatcagtacctacatgtgagagagtgttttaagtcaactagagcgtcaacttataagaagctatggttggaaggaagtgaccctttctacatgtcagtcagtatcttctgaaacaactggcagacagtaggtgcttaatgaacatttgatgactgactcatagtgttatctatggttttattatgtaaaattatttcaagaatttccccaaatttaaattccaatgttgctaattcatcactgctatatctgtacagtactagaattacacacacaatgaaaagaatcctgggccagacgcagtggctcacacttgtgatcccagcactttgggaggctgaggcaggcggatcacctgaggtcagtctggccaacatggtgaaaaccatgtctctactaaaaatacacaaattagctgggtgtggtggcgcatgcctgtaatcacagctactcaggaggctgaggcatgagaatagcttgagcccaggaggtggaggctgcagtgaaccgagatcacaccactgcactccagcctgggagacagagcaagactttgtctcaaaaaaaaagaatagaaaaagaaaaaaaaagaaaagaattctggatgcacattatgattaagtggatctcagcaactgatgtcttctgagatgggttgtgaatatttaataacagggattattagaacaaactattgctttccttatgggggcagtagaattttgtttctttcaggaccattaaagagacagctgtgccagagaaaggactagtttatcccttcttttcaattccatcaggcctgttctgagccaaatccattccaatcagtttgactcattattcttcaagatggaaagctggatatttttacccaacatataggaatttcatgtgacttctcaaattcatacaaaacacttgcaaaagagaacagaattttttaagagaaacttttaaagctccttgcctctaacatcactttcttagctagccaatttcatgtagccaaggaggtaaatggatgtagctaagtaatttcctttcaataaattgaaataaagattccctaaagcttgctgtatactactagaagtcagaaaaagaagatgacactagaaatagtaaagtatcttcctatctgctacagattagaggcaaatataaatatgaccgctgccatctccccccaacaacagtgcaaaatattctggtacaaatatgtgaaggaaaaggctaacacatgcatatacaaaatgccatttgatagcattcgtgttacacccttgggaaggagattgctagccttgctgtccctaattcagttgtaaagaaattgtatataacgtttcaagttggttaagctggaattccatttccaagaatcccctgccctgtgtgattctggttgcgttggctaaaagaagagttttgaaggttgaagtgaagcagcaaccattcctctctgaaggttgtcacagttcaatgtggtgacagtcgcagagatgctggcaagttctggcttgatcttactctcctccaccctgcgtcttgctcttctttctacctgctttccccgtttaccaagcacggcccaagacccagcaccacaggcttgactgcagacccacagaggcaacagcctcggggcatttccctctctatgaaccttcccttcatgcttctcttgcatggctgggcacccttggcttctcagattgactggatggtgacttcccccatcttccaactttcccccagcgccttcatttccccagcctttcccacaactgtataaagtctgctagctgtaacaaatcccttctcccatggcttcatgtgccaaaggtcactgaggattactgaagcccagtttctctggacatcaaagttctcatttagaacaaagctgccatcaaagtgtctagctctgcattatgcaatagactgtgcccttgctaaaggtaaacttgatgtgactgcatttggatgtaacagccaaatatacactagcagtatacccatgagtaataggaacttcttgagaataacaatcccatctgagagaaaagctcatacacaatgaagccggctcaggaagcttagcctcattacaatgccgtgatttttaacttgtgtgggggtgttgctggtaaaattgagtagcaggcaccctgtatgggtgaaagctcagagaagttaattcaataaaagtcaagatggtatgaaattgctgatgaggggggacagaatgattttacagcatgtattttaaaaggccctaatgcttgtgatagtgtatgctcagatatctggattatttccttctttggaccactaccatcaactttgaagacaaccctcatttctcaatgtgcaggagctgtcttgccctgcccactccctccgtactcacctgtaaatgctgcctcctagaatagctgtgatcctgcctaagggcttttgtcaggcagcaggaacctttcacccacatgagcaaaacagaaatgctggagtgttcatgcccttggtggcatcactcaataacaataaggaatcagtggatacctacccgagtgtgtgccctagtctgtctccccaagctcttcagtgggtttgagctctagtagcctgcagtggtaatgcacgtgataatgcaccctgttttagctgctctcccttccctgtctcactttcccactcccgtgctgatatttcctgggatctgcctcctaataaaccacttgcatgtgagtctgtgtctccaagcctgcttctgagggattaaaactaatgccttctccatggctcttagccagggatgcttcttcctggctatttgttctcattaaggattcgtttaggttaaaatttgtattgggtaaaaagagaaggggaaggggctttgcaggtaaagcaaagatgtctgatgataaagtgtactatgatactaaattatagatttccctggaagcctccaaatgaattttgggtctcagagagagttatgagacccggaggatggtaggaaggggcctgtctctctctttctaagcccagtgagagggacttcaacaagactctttggggagcttgatatgcacctctacaggtggggagacacgatgttctggtgcctgccacctctctagagaagctgagagttagaggagagcaggcagcttgttgctctgaaggcagagcaagggcagatactgcagccttgggcttgccctgggtcctagtggtcacttgctaacataccttatatttgctgatgaagaatgggggagtgcttctagtggaaaggaatttggccttgtgcgtgagagagagagggagtgtgcatgttctcttagatcctgaaaataggtaaacagcctcaggagaaagaggctggagcaaatagctgcatttccaggtgttgagaaataggatggctgaatttaacaaaaatacaatatgcccagttaaatttaaattttagttgagcaatgatttgttttgaaagtataagtagatcccatgcactgactgggatgtacttacgtaaaaattattatttgttgttcaggtgaaattcaaatttacctagacatcctgtattttatctggcaactctgcttccaaaccgcctccatttcccagcaggactagaaggaaggttctgtaattgtgaaaatgaagtacttatcatgatacctgtaaaaaaaaaaaatccttggagtagaaagtgaaggttttgctgtgctcccgaactgagctaaagtgttaataaaaacttaatgctcaacttaattaattgttttttcttttaactaattaatctattgatcacatatttactgagtgaatactataggtcagacatagttccaagcactaggcacacaacagtgaacaaagcagatcaagttcttgacctcacagagctttgattctagtgatgtctgtacgtggcaatccgaatagaacttgggaccaaggaggcctgcagagttttgaagcaggtgatggttcctgccttagctcttgcaattcttgcctcctgcactggtgtccaaaactccccagggacaccatcaagaggaaaacctccattattgccagcactgctcggccttgctaagatctgtctgcagatgggatttggggacaatatgactgcagactgctcagctagacctggtgctatatatttccttcataccatacttcatttccaaagggattcgaagcagcaaactcatgcagctttatctgcttcactcactcattcattcgcttcattcagtcaaaaaagagatgagtaaggcatggctcccagctcacagggccatgaaccatgatacgctggagtaaaggaaggacaaggccctcaaagcaagaagctaccgactctgggaactgcaaattgcaatgtcatcatatatgatgctgtcaagaaaaaacaaattaaggagaaacaggaaatgcttcaactccctctcctataattcaattacaattttgcttcctgcttcttttcctaaccctttctaccacactctgtgagggtcatagaatgaaaacaaatataaatactgaattgcaaccacatgcagatagcacatgtaataaaagaagcctgcctatcatggaatttaacatgactggctggggggaatcaggctctttgtccttttaaacttggctcatattttaaatgacgttcctctgggtacatcatgttttagtctaaaagaaaagtatcaggccagtttgtatacacattcaaataaatatactttaccaggtaggtgtctgcattaacctagggaatgtatgagtgtgtgagtgtttagccagccacacatattgtgtgtatactcaccatgtgtgtatagaaaatgctacctgcatgggttgacaatttgatgtttcctaccttatgctaactattcccctttggccagttttttccccaacatcagtaatattattcagttattccctaaggggtgaaaattaagtgctattctgtgtgcagagtaggggaaattaaatctagctgcaacaagttggagctgctccataatccataatctgtagccatgatttgatttccaaaatttactgctggaaataaggttaatagtccccacatgttttcgttaagtctaaatttcacctcaattataggtgaggaaactgagactcagagaagctaaagcccccagtttaagtttgaagggctggttagtcacagtctctcgcaccagtgattgagtgactacagcctgctgccccctttttttagagggtgggtgtatacatcaaagcctgcatgtgttaaatacataggaggggaccaatctgagttggtacgtgaccccttcaccaaagtaggaactgagaaaatgaccttctccagctcacctctctagaaggaggggcactgatgatctttggagatgattttagaggcaaagctagaagctgcaaggccaccccagaaccaccaagcccagtggaacgtcagacggcatctgctcagatgctgatcttgtgtaattcataaatcactgagcctgttgactcggacttctgatgggctacataagcccaccaaggtatgttttaactctgctgtctttgcctttctaatatttcacattgaagttcttataatgcagaatctccctgaaacttctaatgggtttcattcttttgttgactcttcattcattcaggtaagtaacttcgcatttttcatttgtactggtatcagccatttcctaaacattttaatgttgctggttttgaataatagccactccacgcatagcaatctcaacctcccgctccactcaggcaaatgcagccatccatttacagatgtgcataggagctctttgcttatcagggctgccgttttcacaagatcccaagccttatagattccattacactccgcaaaacggcacacttggtctttgtgttgtatgcacttatgtccaagttttatgattattcaagagagtggtcgtggcataagaactctgaattaagcctgagtgatgctggcatgccagaggcaagtgtgagcacagatcttgacagccaaatagcacatcctgttccatatcacataaagttaagtgtgcacaccatatgaatagccacgtacattatcttatactgcagttcagagtagttggtaaacggaaaaaaaaagattctctgttttcctcatttctatgcatgatgacagatcttgacagtatcttggagggttgctaatttagtttcaggcagaaccatgcaattcctattgtctcagcatgactagaccacctcttcagatttcataatgggaaaataacacaatatctgcatttgttcttctggcagccagctagtggtgtgattgcattgttttctcaatcaagaagtaccattatttcagatagactggtacatggaagaagaaaaaaagtaccattgcttttgtcttcattgagttacatcaggatgattttctttggtagtgttatattagagaaagtaggcagggcgcggtggctcacgcctgtaatcccagcactttgggaggccgaggcgggcggatcacaaggtcaggagatcgagaccatcctgactaacacagtgaaaccccatctctactaaaaatacaaaaaattagccaggctcggtggcagcggctgtagtcccagctactccggaggctgaggcaggagaatggcgtgaacctgggaggcggagcttgcagtgagccaagatcgcgccactgcactctagcctgggcgacagagcgagactccgtctccaaaaaaaaaaaaaaaaagagaaagtaatttacagttttattttctctcatttaagcatctaacattattatatgcctaacagagtatatttatctcataaaagttgctgagaattcttttaaattaaatttactccgtagttgcattatattataaaataagagatgtattccagggaagaaagttttaagtaatacttttatattaatcaactgttgttgcataagaaacaaccacaaaaagtttattggcataaatcagtaaacattatttttcatccacacatctgtcatccagctgatgtggctctgctccaggcttgggggttgagtttaggtttgctccacattctggggcccagcttgggagtattctatccggtggctacctagggcagtgttctcatgttagaggtcggaagctcccagaggggaaagtgaaaacaagagctgctttcttttttttttttatttttaatttttatttttattttttgagatggagtctcgctctgtcacccaggctggagtacaatggtacgatctcagctcactgcaacttccgcctcctgggttcaagtgattctcctgcctcagcctctggagtagctgggattacaggcgcccaccacaacgcctggctaatttttttgtatttttagtagagacacggtttcaccatgttggccaggctggtctcgaactcccgacctcaggtgatctgcccacctcggcctcccaaactgctgggatggcaggtgtgagccactgcgcccagccaacaagagctgctgcttaagacctaagctcagaataggcccaatgttactgttgcctacattcgttcgccaaatcaagtcatacgacaaaaaccaacatcaatgacactaggaaaaatacttatcccatgattacaccttcagctttaaaagtgcagtgaactcggccaggagcagtggctcatgcctgtaaccccagcattttgggaggccgaggcgggtagattgactgagctagggagttcaaaaccagcctggccaacatggtgaaaccccatctctactaaaaatacaaaaaaattatgcaggcgtggtggtgggcacctgtaattccagctactcaggaggctgaggcaggagaatcgcttgaacccgcaaggcggaggttgcagtgagccaagactgcaccactgcactccatcctgggtgacagagagagactctgtctcgaaaaaaaaaaaaaaaggaataagtgcagcgaactacaggctcttatttaaatctaagttttaaattcgtgcaatatgaataacaatcatatactacagtcaaatttcaaaacaaaaaaaacacaaagaatggaaaaaaagtaaccagtttggcaggctgtttctcattttatcccatttcacattttatttcctattttatcttctaagagtcagaaacaaattccgataatgtagagaaagttcattagcaattttattaagaaatgcaactaatttttaagtgctgtgttaaaccaacaaatgctcaaattcatttacattaataagattacactattttaaattttcacaggcaaatgtattgaaatataatgtcatggcttaccctaatgcttattattatatgtataaagactttaaaaataattgattttgatattgtttgtattttgttttgttttgtttgtttgtttgtttgtttttgagatggagtctcactctgttgctcaggctggagtgcagtggtgcgatctaagctcactgcaacctttgtctcccaggttcgagtgattctcctgcctcagccaccagagtagctgggattacaggtgtgggccaccacacccggctaatttttgtatctttagtagagatggggtttcaccatgttgtctaggctggtctccaactcctgatctcaagtgatccacctgcctcagcctcccaaagtgctgggattacaggtgtgagccaccatgcccagcctgaaattaattattaagagctctttcagatgactatgtttttcaagctttgtataaacatggcatacacattgtatgtagatatattgatttatcaatttattgattggtgataaagattggatgggggtggggaatggttatgtgtgagaaaataatgtttgttaactactctctacaaattggttttataatacatattttacctaatgagaatgtggagtctcaaggaacacttgcccagagaatttcagttaacaaataataaatgtatctcattttgttcacatagataaaaccagtagtgaagcttatattcttctcatgcaccatactgctattctggttgacacagctgcaagaaggttaatttcgttcctctttttcttccttagcaatttttttaaataacaaaagttaaattttatctgggcatcttctcttttgagatacactggatggatatttctctgccacccagaggataaaagattataattttcttcagtcttctgataatatcatgcattttttcatatgcttttggggattgcagatggtcactgaataattgttattgtattattacatattttagaagtcataattgtaatgacttctaaaatatatcacatgactacttgtgattgacttcagcatacattgtatatagtttaaaaaatattctcaaaataccaattggtcatgattttgaaccattggtgtgcacagaacaaatgcagaaatgttttgtgaacaaatgatatagtttggatatttctcccctccaagtctcatatagaaatgtgaccccccgtgttggaggtgggggtctagtgggaggtgtttgggtcatgggagaagatccttcatgaatggtttggtgccctcctcatagtgttagttcatgtgagagctagttgtttaaaagagcctagcacctccttccctctctcttgctccctcatgccatgtgacatgctggctccccctttgccttccactatggttgtaagcttcctgaagcttcatcagaagctgagtagatatgggtgtgatgtttgtacagccagcagaactgtcagccaaatacacctgttttctttataaattacccagccttaggcattcctttatagcaataaaaaatggactgacacagaaaattgttactgagaagtggggcattgctgtaaagatacttgaagatgtgaaagtggctttgaaactggtaatgggcacagggttggaagagtttggaaggcttagaaaaagacaggaagacaagggaaagtttgcaacttcttagagacttgttaagtggttgtgaccaaaatgccaatagaaatatggacagtgaaggccaggctgactcagataaaaatgaggaagttattgggaactagtgtagagaacaaggtagtgctagtaccttgttgtgtactagcaaagggcttggctgcattgcatccacgtctgaggcctctgtggaaggtgaaacttaagagtgatgacttaggatatttggaagaagaaatctctaagcagcaaagcattcaagatgtggcatggctgcttctgaaaacctatacatagatatgggagcaaaaaaatgacttaaagttggaacttacaattcaatgagaagcagagcttaaaaatttggaaaattcacaacttgaccctgtggtagaaaaggaaaaagcattttcaggagagacattcaagtgggcttcagagcaaccacttgctagagagatttgcatgactgaaagggagccaagtgctaatattcaagacaatgaataaaaggccttgaaggcatttcagaactctaggctgcccttcccatcacaggcccagagacctagaaggaaggaaggaattgattagggggccaggcccaaggctccactttccttgcagcctcaggacactgctccctggatccacgctagcagtgctgtagcttcagctataagggccccaggtacagcttgggctgccactgtggagagcacaagccataagccttggtgagttccatgtgttgcgaagtctgcaagcatgcagaatgcaagagtgaaggaggcttggtagcttccacctacatttcagagactgtatgggaaagcgtgggtgcccaggcagtagcctgctacagaggcggagcccctgcagagagtctctactaggtcaatgtctaggggaaaatgtggggttggagctaccatacagaatccccactggggcactgcctagtggagctgtgggaaggggttgccaccctctagacaagagaatggtagagtcaccagcagcttgcaccttgagcctggaaaagccacaggcactcaactccaacctttgaaagcagtcacagagcacagaggctgcaccctacaaagctacaggggcagggcttcccaaggccttgggagcccacccctcacaccagtgtgcttaggatgaagagcctggagtcaaggattatgctggagctgtaagatttagtgtctgccctgctgttgcctcattcttttggctgattcctccctgtagtaatgggattgtttacccaatgccagttctaccattgtatcttggaagtaaataacttatttttgattttacacgttcctaggtagaaggaacttgccatgggtttcagatgagggtttggacttttgagttaatgctggaatgagttaagactttggggaactactgggaagggatggttgtattttacagtgtgagaaggacatgaaatttgggggatcaggggtagaatgatatggcctggatatctgtcctctccaaatctcatgttgaaatgtaatcctcaattttggaggcaaggtctagtggggagtgtttagctcttagggagcagatccctcatgaatggcttggtgtcctccccatagtttcagttcatgcaagagttacttgtttaaaagagcctggcacctcctccgctctcttttgctccttctcatcatgtgacacactggctccccctttgccttctatcatgattacaagcttcctgcagcctcaccagaagctgaatggatcgtggtaccatgcttgcacagctgcagaaccatgagccaaagaaaccttttctttataagttacccagtctcaggtattcctttatggcaactcaaaacagattaacaccaaaaaggaatggagacatctacccgcttttcactagggtaaacttgaatacctttgttttgttttgtttttggaaaaaaaaaaaaacccaaaaaagtcttaaattattacgaatagcaaaaattagtgatcagcaagcaaccaacttgtggttaagtaataaaatttgtaagactattatagccaggaattctgtttttgaaaaatgactttaacaatgggctttggctctattttgaatcttaaagaggataagaaatatgagctcccaatatacaatggaatttaaatacaacaattgtggaagttttgtacagttgttgatggattacccacagctgacatgcttttacttggtcagaagataaaaagaatagaaacatttaggccattcgtgtgttgttaaagcaagttggaattcaagaagacatctgattccactaaatcagcgaggagttttcaaaaagcagatggcattttaagccaaaagacagtcctttgaaggatcttgagacatgtaatttatctgaatacatgttgctctcatctgtgatttcctggaggataggaactatgtcagattcatgccttccttccctagctcagtgactggaaagcagaggggctcaataaatgtcttaagagaaaagagaggagaaaattttgtaatgctatttgaaactttatgcaaaatatttgctcaagtatttcacactcagtactttttactttttgcctatatgcatactaaagtacaaataaattattgctgattgtgttgattttgcccattaaatttgcattgtatttattttaaacaagtctatgtttttagacattaagataaaaatgctaccttatagaaaaacaatgaacagtgctgtaaattaaaattagcaccttagaaacaaaactaaatagatttcagggtttgttgttctgaagtaaattctgtgctgcaaattttgaatcctaaaattcagaacataatttttaggctccataaaacatgtttgtggttggctgctttatagtaacatatttttgtatgcatttggcttcatttcttctattattgtgattctcattccacttgttacctagcagttgccttttctactgtttaaaaaattttttaagggggaaatgtgttttgtaactcagaaaaacataatgtaagatttctcaaaatatatgattttaaaacaaggacaataaatgatttcctcttaaaactgacattacttaaattactaacacaataatatctttaaatgtctacatacatgttaaatggattgtaatgtcttttgaaaaatatttacatattttgtttcagagactaagtatactcaatttatctacaatgattcctttgttgacaaatagttacaggcgtgactgatttgatagttcattggaagaagatcttcggtatctttcataaagcttagaattggcctggtatttaaaaaataattcatgttggagtaatttttgtatggttaatccatttaaagacagacaggataattcatttttcactgaatcatctagatagtagaggcctataattgatgatggcaagaataagaatatttaacctttgggtgaaccaaatgaataaaactctttgcaacaattcttatgggtagaaacagtatttttctgactctagtttagtatcttgggcttcttcccaactgtgagcttatggagaaatgattcctctaaggcagaatattacttaggttattgtcctattatttctttcctttccatcaattacttccagtctagcagcttttagcaagattcttgtttgaggttagccatcctgctatataatctggagtctaggaaaagtacatgtcattttacctggatattttactcaatattaaacatttatgttctaagtttgaatatccccctttccacatctaaaaaagaataaatcaaatagtaaaccccattgctataatttgaatgtgtcccccaaagtttgtgtgttgaaaacttgatccccaaagcagtggtgttggaagatggggcctaataaaaggtgtttgggtcatgggggcaccatcctcatgaataggttaatgtccttatcttataagtgggtttgttagcatgagaattggttcatcttctcttgcatactctctcttgccctttctttgcccttctgccatgggatgataatatcaagaaggcctctaccagaagctagcaccttgatattggactttccagcctctagaactgtgagaaatgaactttttaaaattataaattccccagtctctgctattgtgttatagcagcaaaaaaatggactaagatacccatgaaggagaagtgataataaagacaagcttaaagctatctatatttgaagactcttgaaaaactatgaatatgtctccaactactatcaaagatgttagttagaatatagattataaaaaaatcccatacctcaaccattctcactactagaaacacatattactaaaaccctgtggcctgccaattgtaaggtaatcttttaacataagaaactgcattaattttctataaacccaaagacttgcacaattatttcagaagtgtaattctcccaacacacacacacacacacacacacacacacacacacacacacacgtaccacatttcttttcagtagcttgactataacttggaaaaaatgctttagagaaatcacttcaggatggtggaaaaaacaaagaatcataattctccttatgtgtaatcaatagtaacactccatctcatgtataagtttcatatactttcaagtccagctctctggctttgttcatttcattcaacaggactgaaacaaaggtcttggcctcagtttttcacatgaagatgtttgcaaaggaaacagtattttaaagagtatttaattcacagaagctgactataaaaaataactaagaagcttcttttcttccaagacttagtgtttcccttgttaatgagacatttgtcatatagacttgtttactgccttgttcagtttcatagaaaaaaatgatgtacttttagaatttgatatagaaaatattaccagaaaaattataacaaatggcatgtttagaatttatagtctgctgaaatacaatttaggtctttattttactatgaaaatgcaatcaatagccaaaatccaacgtattccagtgattgaagtttatttgaatactgtgaagttgtgaaatacatatttggtcttccctctgtgtctttctataagctaatgagttagctggtgactggcagcccctaggtagcttaaggatgggggctggtcacagaaaaggccaaagaaggcatgattagagggttgagacttttcagccccatcctcaacctctggggagtgtagaggggctgaaggttgagttgatcaacagtggccaataatttaatcaatcatgcgtacctaatgaagcttgtataaaaacctgaaaagactgggttcagggagcttccagatagctgaacacctgaagacgactggagggtacccccctggaaggggcttggaagattggctcctcccatacttattcattccttatccgtatcttttgtaatgtcctataaattgcacccgaggaggaggttgtgggaacctcgatttagagctggtggtcagaagcacaggtaaaataacttgtgctttcaacttacatttgaagccagggggacagtcttgtgggactgaaacctgaacctgtggtatctggcactatctccaggtagaaagtatcagaactgagttagaggacacatagctggtatccactgcagaattgattgcttgcttggtgtggaatgaaaatgcaatgtattggaagcccctctctcccccatatctgatgtcagaagcgttctgtgtgatgtgatgtggtgggtagagaatagaaaacacacacttcagtttttactatatccttccacgtatttactgacagcaggcattcatatggaatgtcaggcactgcaagcgatacacacatccataagacagcatctcttccattaagaatcttaccaactcacaaaagaaaagagatatgaatacatggaaaggtaaatggcaatagagtatttaaataagtaagtagaatttgaatttgtctttgataatggtgaggaggtgaaaggagttcttgaaagtctggaacaaaaatcaaatcaacttatgagtggatagaagatgggtaggtaatgctaaagccagtatagtaacatatgttaagtgtagactctaggtgggttcattgtaaaattatttcagcttttctgtatgtttgaaattttcattaaaaaatgatgaaaaaagacgagcatataaagggagagaagtaaactactttgatgggcatttaatttgatgtaatggaaaataaaatacgaaaggtaagttctaggaataattgtattttattagttctctgcttcatttggtcagaaaactaaaggcatttaatgttagagaataaattacattgtgtatctatcagctaataatagaatttccaactcaaattggcttatgtataaggaaagttattatcgtgcctaacaggaaaaccaaaattaggacagacttcagggctgtttaaatcagttccttgtaaattctctgaggggtgtaagcaccctctctgctgtctataacatcatcttcaatatgaggctagtttctatccactcaaaagatggctgacagcagtcttctctctttccattgcaaaaaaatgactgccttcattttcccagttgccctgagtaaactcctccttgtgtctttctgtcctaaattgatttaaacctgcccagttctgaatcaagctctggtaagagggtgaggaaatacaggctcatgactggcttagactcgtcatggcagggggcagcaacacagtgaccactgcagggtagagaagagacaaagacaccctccatgagcgctgaaggataaagggtgggggaaaggcatttgttcgtaaaaagtgtaaaccaggtacttttaggaaaattttaggggaagaatatgttataaaagagaattatctttatgacagtaacttttttcaatgattataaaggcgatatgtgttaactatcaaaacttcataaaaggcgatcagttataaccttataatcaaggtttatgttgacatttccttcaaacatttattatgtgtgtctgtgtgaataaatatatatgttatatacttgttatgatactgcctatacaattttgtgttccacttgctttccttaccattatatcaccaatatttttaatgtccttgtaatgtatttacaaattttgtttaaatggctgcatatctttccattacagaaaagtacttcatttgggtaaatattcttatacgatacaatatttaaaataaatcaatttctgctttgttattaacactggtataaatatctttataataaaacattgtctgaatctctgattatttccttagaaaagattttcaattagtatatcattaagccaaactgtatgaatagttttaatctcaatacatattgtcaaattaagcttgtcacattttatacttataattgagtgatgattccatggtttctaagtattactgttattatcattactattatttagcaactcccttttggcaggaacaatatgctttctcacttttcagctccaaggaggtctgtaggagatatagctacaaatatgttttctgtcacttttgttcttcattaccatcttgctgcatttcttccttcttctttggcattcttacatttaaaaagtagagatggggacatgtctctgttatttcttcttttatttatttctaaatctatttcttgttatttcttgatctaatatccatacaggtttaggatgtaagcatttaaactttcatacgtagaactccacatagcaatgaaggaagaaatcaaagagtaaatgaatgaattagtgaatgaatgcaatgaatgagaatgcaatatctggtagttcagaatgaaattttccttatcaagtccataaaatttgcaaattacttcataaaagtgctttataggttttggcattttaacaatgtttacagtgttttagaagagacaaaagatttcagtcttgtggcagttagccagaatagggagcaaatgtgcatgtaattgcactattaagttattaagggtggtaagaaatttacacaaaacagaccctgaattgttttaaattctgttagttgaaaggttaacaaaggagaaattatattctttaactcctttttttgtttgtttgtttttaattcacctttattttccacttggccacattattttcttgttaaataaagaagagttatgaattttcttaatgagttaataatgtaagctgaatgtccacaggtaaagggtcttatgtttcaagttcatgacattaggcgacaaaaatcagtatatccaagtatgaatgagtagggaaaaaaagttatttcatttctggaaccatatttttagttccaggatgtaacactgtaggagataatatatgtgaaagcgtcttgaaattgtaaagcactatctaaatgtaaaggattagtattagtagtgtggtaaatcatttttctgaaggttggtttggaccatttatattttcaaagtagatgaatagaagaaaaatatgttttactccaagaatggctgatttcctcctctagagtagttgtagcacttttcctggtttgatttgattaatccttatgccttcctggtgaggaagattggaggctcacgttgcatttttatggatcttgcctacattaagtttcagatatatagatgccatttcttaccagtgcagctgactcgtctgtcttttaattatttcttttatcactgaatttcagatggacacactagagggaccatagcagggagcccactgcagcggcagcagttgctgcagcgtttggaagtgttgatatggcttctggaggtttttcctgatgctttgagctgggctgggggagggggaggcattctcagaaagctcacaggactcaatgcggggaaagggccactggaaaaggagctacccaagccattactcttcagctttcactgagtgtttatatgccttggttttatttcagaaaactaattatggaacattccagcattcttcataaaaagtgagcttggggagtttatcgggtcctggggagtcataagaaaaggatcaatccaagaggtggagcagaaaacaatcaggggacttggagtttgccagctggaaaaaaagttaaaagcggccaaagagccctggaagataatagaagctatattcagattcccaagttgtattctgagtttttgctccttggaatatccatagtcctccatttcagtttccaaagtaccccttctcctaagaactcaagaggctacccaatttttctcacaatgtccatacagagaagggggatgaaaggccaggtattgttatttcaatgtcaggcacacacagaaactcaggcataggaaagtaaactgctcaggatgacaaagtgttgttaggtgatataggcttcaattttattttttactcttcaaaaacttttatttggtcaagtgatatttgagagagatataaaaaaaatcttctttataaaaatgtcagtgccttccaggccatgtgtattcttccctgttttaggaattatcaggaactattgggaacaactgaggcctcttggtcactagttacatacctcctttgaacaatctcttccttcactttctttttttttttttctgcaatcttcgactcctgggttcaagcgattctcctgtctcagcctctcgagtagctgggactacaggccctgccactatgcccagctaatttttatatttttagtagagtcaggattttgtcatattggtcaggctggtcacagactcctgacctcaggtgatccacctggcttagcctcccaaaatgctgggattataggcatgagccaccatgcctggcctcttccttcactttcttacagtgaggcctggctgtctccaaaggatttgctctccctgcagccttctcatccagttctgttcatttttcctgtacaccatgcaccatgggtcctagatgaaagaaagatgacctccttgttcataaaaatcatttgcagactatttttccttctcttctagaaagaaaaaaagaatcaacttctttgaaatgtatgtttacttgtatgtcctcagattatcccatctagagttaacattttttctcctggttgcttcctctcagttacagggaattttagcattttttcccccatgactactttcttaattcttggtggctccagcaaagaatggaaggttcttggctggtccatccatcacctaagccccccagttccttgactttctctccttcacttctcttctggtctacccatcctcactcactccctgcacagtcatactctttttgatcttgccattgcaataattgcaccagctccataatgttagttttgagcatcccgttctttgactactacttcttatctttgcagctccttccctgaatccaagaagccattaatcccacacacatctccacacttgagcctactatattccaccattcatcctccccttaacattcacacctccctggcatggagttcacaagccactgtgatgatctctccagaacacacaccctcaactcccttgactccctcaaagtcacctagaaaaaactcaccaccagttaagtcctcctttctgcctgctctccacctatttccaggcagttgaacatgactggggaaaagctcacaaccacactctggtctcaagtgggtcctcagcctcctagaaagtctcttcacattccctcagttaagccagtccctcatcactaagaaaaccacttcctcagtcattaacatcattagcatcaactccaatctacttgttttcaactttccccagagaaaatagaagctatcaccagagaactttgtcttcaaactactaaatctaccaacctgcctgcttctttatcccatacacttaccctggatccctggccctcactcacttgatgtttgcttctgccttagccatattttttcttttctcttgactctaatgccttccatcttcaaaacagaacagccaaataaataaataaataaataaataaataaataaataaataaataacatcctctctcctgtgtcccctcttcagctactcttccaggcttttagagcagaactcctcaaaagacatgtctttgtgatctctccacttcctcacaaccattgtctctcaaactcacaagtctactgcaaaacacacttgttaaagtcaatgttaaagtcagcgatgagttccctcttaccaaatacactggtcagtttcctgatcagtatatgtatcttaatatgcactgccgcagcatctgacataatggtcacatcttcctttccgaaacaccttgttcctttgcccttggacatccttcactcttattttctcttactttattagctccttcctcctactctctttttctggttccttttgaacactggagttttccagggctcagttcttggaccctttttcttctgtatcttcgcttaatgtctttaagtgacattaaccaggtctgttccactttatggtttatttgctgaggaattcagctcctaccttttccctgtgttccagactcattcatgcacttgtctgtttagtgtttttgcctggaaatctaataggcatcataagcataacatgttcgaaaagaactatgagtgtccaaaattcaccattccccattctcttcttaaaaattagtatcctctttaacttagttgctcaaagcctaaaaccttagctttatgctttacttttctccctctgtctcttcctctgtatctcttctttctcgccttttctccctctctcttgctgtcttattctccacatccactccacgagtaaatcttgcttactctaccttcaaatatatcactttaaaattatttattgtttatctactccactagaacataagctcccagaggccaggagctttttgtcttatttgctactgtttcttcaagcatttagaatgagaattggcagactatgacccatcagccaaatccaggctttcactgaatggtttttacatctttacatggttaaaacattaaaaaataaaataaaattttgtaataaaaaaattaaatgaaattcaaatttcagtatccagaaataaagttttattggaacacagccatgctcatttgtttacatgttgtctatagctattttgtcattacaacaactgagttgagtagttctgacagagatttttatgggatgcaaagctgaaaatattcacaatctggcactttgtagaaaaaagcttggcagtttctaccgtggattaacattccttcacagaagctgaagcttaaatttattttttctgctagttccaataatgaattcagaactcagtcttgtatccatgaaccacatggctattcttgaaccaacccctgatgaagtgttagaccacagttaattgtataaatctgggtccatgcccatctctaaagctggggaatggagaaggattaacactctctatatcatatgggcttaatatggaagagaggcagtttcccaagggaagttgacacgctataaccaagaggggtgagtagagaccacccctctgataggaaaaacaaaacacttgttttctacatggaccttcctgctattttttaaaaaatggcacattccaaaactcttaatcctatcaggaattaaaattttttgttactaagttatacatacttagtttactagaatgtaatacttggtaccttaaaccatctgtatcttggataggatctttgttttcttaaatccatggactccaaacatatataactattactttttgaagctaattgtgctggaatgggacatagtccaggaggtatgaaaatggatgtcatgcctgggaggcgtggaccaatttatagatgtcctaggcaggagccaggctactggtaccacatgtacactcagcttcttggcaatgacagaatgagatctctgcatgttgtacctcattccagctctctttcctcattgtgagaattaaggaccacccagccagagtgggaggttatctgctacaagtccttactaatttatcagacaaaccaattcaaggtatcagaattcatggagaagaggagaggacagatttctgactaaaccgtgtgtctgaatctccccctcaataaagggaagccattggagatcattaagaaacaaacaaaaacttttatatggtcagattgtgttttagcaagcttattggcggtagtttggaggctgtgtcatagaggaaaaagataatatagaatggattgtggccattggtaattctcctaactcaataacttcttagtctcgtattcttgaagtcatggagaaatccttgagtcagtgaaatgttcctttatcacaatgtcacactgcaagaggtttttttttttttttttttttttcctaagctgaagatagaactgttttggaaatcatagaaacatatttgcaacatgcaagatgttatttctgcattgatcattttaattcaagaaattagtttgggaattagacttcaatagtcttgtgattcacccttttgaaattaatgaagatttacaattttgagttcctctttgctagcattttcccctttgaatagcaatgctttgttcataattgtgacatttcttttctgttcgcattctctcactgagaattctctttgatagggtggattttctgcaatagaaataacatttttgtgcaactaaaaaaaagccaaatgccaaagggtaaaaaataagtttttgtggttataagattgttaaatgtagatgtaaaattatgttatttctgatgtcccatccaattgtggcataagcctgaagtttcgttcaccctgagatctcttattatcagccttttctggggtgaggtctagctcacacagaatccccagtgtaagggctgtgatgttattttaaacatttcattaatttaaaactgtcatttaacaatggcctctagttctaccaatggacttccttgtgggtttctgacaaaggtcgtggtctgtggtccctctccacacctaattgtgatgaccttctgagaataatgactgctgcttcacatctaccttcccagctttgtgaatctctggggttggccagctgtcacttagaatcatacaaggaaagggattctgcaagatgtaggcccagcttaaccaagcagacacacaccctattttcttctttcactaaaaccaatcattccctattttattctttaaacaaaggactactcgacaatgctattaattttcagcataattaattacgcctaaaagtaaattatactcttcctttaggggttgcttatttgtcacaacttgcccctggcaagtctgcatcttgtcaactagcagtttgtactcttgtcttctttttctcttgcctttaaataggaactataatcagtttattttccctccacatcaacaataattttttttttttacttaattttcttagaaaattctaggctggcatgtaaaatgtaatggttggtattagagcaaagcatgtagcacaatgaaacgccatctttaataaaggcatatgtgcctttattaaaggtttctccaaggtttctgttacaggaaatcatacatcatgggtggctagaggagaggcatcactgtctatgggagtcattggagcagaaacagatttatttcatattcttcctttgactattcaaacatagaccaccagatttatgaaatcctatgttctgtatctctgtatcttcctttcccctgatgtcatttatttgaaccacagcacaaaatgagattgagtaggcaaaggccattaaattcaatgtcattataggaggtgcaaggggaagcttggattcttatgagcacattctccacaagtagaaaccttaagaagcaacactaggttttttttttttgttttttttttttaatgaagttttgctctttttgcccatcctggagtgcagtggcgcgatctggactcactgcaacctctgcctcccgggttcaagtgattctcctgcctcagcttcccaagtagctggaattaacaggtgtgcatcaccattcccggctaaatttttgtatttttaatagagatggggtttcaccatattggccatgctggtctcgaagtcctgacctcatgtgatctgcccacctcagcatcccaaagtgctgggattacagacgtgagccaccacacccggccaactagtttttcttaccatctctcttgcttttcctcttcaccatgagatcaccatagccatgtggagcagagtcttggctgacccatggccaccaacatacaacatgagtgagaaagaagtcaaggctatttttattttgtaagccactgaaatgtggagtctgttatcacagtaaaagctaattaatatggaagttagaaataaattgcaccaaactgctaacagtgactctttctgtcatgttgaggagattagaggttactatgatttttcttactttgtttgtattttccctgttactgtattatgaataattttagatgtggaaaaaagttatttttttcttttaagcatacattcagttcttccttggcaacagacatttgaaatgtaattaaatttggactattcttgaacaaaggtgtttgccatactcagggcaaacttgtaatgctgcattaaaacatatatgtccttcaaattgacctacagattcaatgcaatacttttcaaaatcctgctggctttggagaaattaataagctaatcctaaaattcatatggaaactcaggggacctagaatagcttaaaacaatcttgagaaagaagaacaaagttgtaggactcacacttcctgatctcaaagttacagtaatcaagatactgtggtactaatatagaatcaaaatataaatcaatagaatataactgagactccctgagtaaatcctcacataatggtccattgtttttcaacaagaatgccaaaacaattcagtagaggaaagaatgctgctagaatgactgggtatcctcaaggaaaagaatgaagttggaccctctatctcacatcatatataaaaattaacacaaaatgaattcaagacctaaatgtaagagccaaaactgtaaaactggattagaagagaatttagggatgcattttcatgaccttggtttaaggcaatagtttcttggatatgaaacaacaagcacaagcaagaaaagaaaaaacatagataaattgaacttcatcaaaattaaaaacttttgtgcttcaaaggacacaagaaaatgaagagctggcccacagaaggagagaaaatatttgaaaatgatatgtatgataagggtctcatacctagcatacataaagaacttttacaagtcaataatagaaagacaaagagctcagtttaatcatgagggggacatggatggtaggatgtaagtatatacaaggggaaactgacatgtctttaggaagttagatatctattaaaaggactagcataatacttgtatatcccttgtttggaaatgtgatattcttattgattcctttggtctacactgatcaccacttttcaatatattagaatattgcaaaaatcacaccactaacatgattcaaaacaaactcctatgtattgagtcgataatatattcaaagcattatattggaccttgcagaatttaaagatgaataacacacacacacacaacacacacacacacacacacacacacacacacacacacagattttttcttgaagtaatgtttagttcacagaatccattcctcaggccacccatatcaacactgcttgaaacttaacaagtacattctcaggacccacccacccaccaaccagatctactgaattagaacctcgctctggtgaggtggggttgagggagtcccagcaatacacgtcccacatcttgttaagtcctccaggtgattctgatgcatgttaacatctgagaaccactgggttaagagatgaagaattaaaaaaattattcaagctcatatactacaagacagaatacagtaaatggcctaaaataggtacaaagtattgcatttcgtggctaacttgcaaattgtaactagtttaaaaaatgatttgttattgaatacacactatgtatgttatcttttgctaagttttatgaaaagcattttgttttgaataaaatttcttcccatctctagaatagagccgtgattatgaactaagtagggaagaaggaggaatatcagaatcaactaagggtctttatcagattacctgagtctccctctactctggccccaatcccctgttgaaaaccacagttctagatggtcacaatggagaatcttaaatattcagaatgttactttgatcagattatttttggataccagctaatccagtgatcatcattttgattctttattttacctaccctttagtctgttcactaacatttgattgctgctctgagtctttaatttaaaacaaacacatgaagtatcttgtagggcttatggaagaggtgaaatcagagtgaagtgacagtcaagttttccttctaactgtgacacacactagtataacgttgtacaggccacttaacatttctgatgaggcttaatttcattatctctaatattagttcaagatcccccgcttactttacaggatattgagaggactaaaggagataatatttgtgaggttatatagcacatattaggccctttaagattagcaatgatggtccttccatatttttctagagatgtccttctcctgaattcctgacctatcagtggatatccatgatgtagaaaatacttccaaaacatttttactctttgataccataattgtagggaaaatctatttaattatctataccaatacctatcatctatttatgtatctttattatctctcttatttatctttctatttctctatcaattatctatcagttaaatggaagcagacacttttatattgagaatgtatagctatcgggactctattcaattaacagaattaaattgatattgacaggcttaaagacaattcaaataactaaggaaatattgacaaaaaagaatgactaaggagagggaaaaatttgccttaccaaatattaaaacttctttcaaagctactataatctaaataccatggtattagcacactagtacacacatcagtggaacaaaatacagaattcaggcatagacccaagtttgcatggaaatataatatataatgaaagacatttcaattaactgcaattaactgtggtaagaatgttttatttaataaatggagctgacagaataaactatccatttggaaggagagcagagctatgtcttgcctcatatcagagatggattaaatacctaaattgtaatggattaaatatttaaatgtaaaacataaaagtaaaacttggactgtttgtttaactttgcggtaggagaggacttattaagaaagacattgattaaaaaggtgcgatacatatttgactgtttaaaaattaaaatttttcatggcaaatgtcaatataaacaaaattaaaagacaaatatgagtgggaaaaatatgttaccaatttgaaagaattagtctgtaatatagaaaaagttctcacaaatttgtaaagacaatgagcaaggatatcttttctaggtaatatacagaagaaaaaaattttaaatggtcaataaacatataaagatatgtttaacctttctagtaaagcaaattcaaataaaaacaataatgaaattgtgttcttcattcataaattgggaaaaaattaaaatattgatttttttcacatgccaggtaacatgtagggaaatgatcattgtcatgcatttttaaagggaaagtgaattgttttaaaacattgcaaattaatcagataatagtaaaataaaataatgccagtgctcatttgcataacactcacactttggagaatttatcctacaaaaatcagtttgcaatatatgaggatcaaaatgcaagagtgcctcttttggcatcatatataatggcaataacctggaaacaatctgagtgtcttttggtaagagaatggctgaatcaaatatgggacatccatcctatggattatgattaagctgtccaaagcaatgaaatagatcagcatctgctgacttgaaagaataaccattaaaacatatatactatattttatatatatatatatatatatatatatatatatatatatatatatatatatataatattttgtgtgtgtgtgtgtgttgctttaaagtcaggcaaagctactgagaaatgtgaggttatttcataattgtgaaaaaattaactgctggatatgtgtatagatgtatctgtgaatcgatgaataaggaagaaaaagtgagaggatacaaataaggaaatgaacatcacttatacatttacatggggacttgactggaagagagttgctggggatgatgaattttttgattagacatctttgatttgtttcacatgtcataaatatataataactctaacttaaaaatataataaagacaggactcaggttaggtgtaatcttctatgtatgtgcacagtacaggtctggaagggccatgccaaattgccaattttagaacctcttaggaggagagtggtattaggaaaagagggtaaaagagagtaagctttttcttgtacatatttctgtatttattaatgactgttattttacaatgagtacctattcaggtattgctcatgtgatttaaaaataaataattgttttcacccaagctttaaatagttgtttacacccaagcagtagagtaggacagttttttttctcccttcagtagacaacagttattggcacaaacattagcaagcataatggttgtaatttggttgaagaagataatcatgtattagcttaagtaaaatgcaatgccttgcaaagatctgtcattctatgaaagtattgacttagagtagtcccaactaggaaatacaaggcgtaatccacagattcttgtgcaattcagctgtattatctcttatagctcctataaaccttaacactaattaaggatctttaagaggtttttaactagagggatgggagaaagggtgtctttatccccacttaggcagaagaaatgttttaaagtggaaaatgagcaattgatggttgccttgccaagtataattaagaaaattcagcagcactgattgtaccaagttctggaagtaaaatctgccagaggctgagatttggcctttatgtaatactaatactgtaaactcaacatgtcaactcttttatctgattttaattcttggaataagctataatctctcacgtatagcataatgtattttatgcccatggcccaaagcaaaaggtctccttttgcttccctccctcctacattatctgggaacttggtgtcaactcctttacgctctgtacctccctttgcccttgagtcctgctgccacactgaaggcctgccttcttctcagctgttcactaacttcttttactgcacagtttgctggttgtgatttcttatttttttcaagaggattgagagacttagaaaagcttctaggacccagagaaggaagctgtagtggctaaacttcacagacatcatgactggcaagaagtatctggctcataggaagttcttgccttcagggatataggagttttcttgcaaatgtaaaccctgaatagtttgaaaaattatgtagccatatgaaacaagagcataagccatgtgtgatagggctacgtaggatcagctttcagaggagtagtttagatcagtgtgtgctgagatgtttgagagagaataaaaatcacacaggatttggtctgttgcactgctggagaaaattaggagatgatatttatgtataaattctcaaagatatatgttgacctgctacagcagtaatatatgctaggacatataatatcactttggatagataaatgtacatatatatatatatgtgagggcaggaatgaattgttcaatggtattggtgataggtttagggttaagaatgctaattaacttatttttaccatacactggatgcaactatctctttcttccatggcactacactcttgtttgatataatttatctttcccaaagatggtgatcattttctttgatattcagcccaatgcactgaaatattgtttgcccagagcctatgttttcttctaccttcctcactgcttacaagaacaaaaggtacactacaaatctaatttcatgcaattggcctatttatgagccacataaatgtggcacaaacacatttaccgagaactataattttaagaattaagtccctctgggggaagaagaagagaggtagaattatatgcatgaatggggctgaaagagctgttcaaagtttggtgatgagtgggcaaactcaggagagctgagtacccttggtaagttaaaaaagtaagtcagtattcaagagactaggaagaacatgaaagaagcccatgcaggagaataagcagtgagataaactgagttttggagacacagaaatgtccttggaacccaggaatacaaagcctggtgaagtggacggagattctagggatactttctgtgccccatccataccctttcagatattatcattgtcatataagtggctgacttccccctgccatcatgttcattacttggcctaagggctttctctaatcaatggagtccacctagacctagcataatgaagaaatagagaaaatacaagtattgaccttccctccccacccacctccccaactatagcatccttcaaccaaggatgaggtgtaaatgcctcaacttcctccttgggtgagataacactggatcctagcaatccgaattgcaattaatctgcagttatctacagtactaacacctagtaacacattcaacattgacttatcttcctttccccactttaccattgcctctctggtatggtctgggatcccctccccaaaaacctagctacataaatctagatttgttccaaatcttactttgggggaatccaaactaagatggggatatgtatacaaaaaggttagggaaggacttaaaaaataaaaccaaacaaaaaaaaaatgaaaaataaaagtttttatgtgatccaactaggacagttaagataaatgaatgaaaatattttttttttcctttaactaaaactgtttaaaaaagagtttaggaaacattgttatttaccgattttctggattagtgttttgtgaaggaaagggaaacatcatgggcacttttttaaagtaagcttctgcaaactgtaatgctttaaaccaaaccgcatgttaactggaataatgggaacccacgtcactaagagacccattgcctggttctctgtggtttcttaccacagtagttgtttttgaaaataggtggtctttttcaaagagcacttatgttatgtgttgaaataatgaaaaagcttctgaaacacaatatgcattttttaatctagtaataaagaaagtaatgtggctgaataatgcctggctagattagttttgacactgtatttgctttgtgttcaactttatctggcaatgcattattcactagtactatacacagtgctttattaagtcttaatcaaatgcattttatcataagtgtcaattcagtgctttgccattgtatttatatgtttttaaatactgagttctttgtaagtgaacgacaaatacttaggctggaaaataagattgtatttctggtgcttgggaatgaggtcattgtgtatgcacagagtggctttacattcacactaaagtcatttggaaacagattatattgccgtttcttttttctcctaataaaatgaaatgtaattttcttcaccaatgtgaaagctaagctggtttgaccaattgtggccatttaaataggtttgtagagcaaatagatataaattaaaacttttgctagtagatttttatttaatagattttggactaaattttcaaatgtgggttaacaataaaaatttatgcacaaactgacaagtgattacaggtacacacattttcaaatataattaataatatgtttaagtataataaaactataataaatttttataaagtattcattaaataattttattataattaaatattttcattataattaaaatttatatatttataacattttaaaataatttataattataacaaaatgttataaatacaagctggccttggaaagcttcttaggttttttttattttctaggaaggaaatgcttacaaaatatactattaagttaagatcttagacttactcttctgataatattggaaaacttcagtttaaaaagtattgtacaaatccaacttcaagtttcttgatatttcttttatcaaaacagcagctatagatttgtaaaagttctagtatttggagaaaaaatataaatattataaccctacaacattagtttggagaaatctgtttattccacaggtaaatgtatctgtaagactaacaaaattcataatttttgatttaaaaaatcagcacataaaaataattgcagggctttaaatgagcacagcattaagttgggctgctgtctctctccgaataagtgctaagtgaagcaggaatgttttaatggcatgaggccctacacaccaaaatggcattagcctctgagtaaatatcactagttggatagagttttattctacaaagtaaatacttaggaaattaaatattaattagtacttacatgtgcaatactaagaataaagtagaatcttctttaccctaaaacaatatcccaccatgccacataaatgacactgaagtgattatttgtaaaaacaaaagcgaaataaaattatgataatctccccaaattatctccccaccaaagattattgattttatttatttatgattttattttagaaaatcgtggtttgtataaaagggtcccaggtatatctggatgttttgataggagtttagggaatcctagaggcttccacgcagaatggattccatgaccatttttccatgaaaccatttgaaaccactaatgattggtgggccggggtccttttccattgtccttttgtgatatcttgcactttttcatttttattttttcttctttctcatttctttgctccaatgtttaaatattcctgccttgttagcgtgtttcattttcttggcctatgaactgctctactcataggtaaagcttggtccgttgtgaaaaggcctcagtaactttttaggtttgttctgatggattaataaatatgtttaagcttttgagattagtatttatttatttaaaaaagctacctcactaattttgaggaacactgaattaaattcaaagttttctttattatgaaaattctcagaacctttaatattcattctaatattcattctgatgacatatacttctaagagagggatataggatacaattatttctgcatcttatttgcccacagaaccccttttgtgtgggtagagggagcaatggaaaacttttatagtacttagtctgtgtcagacactgttctaagtgctttaccttatgaggagaaaaggaaaaaacttttttacagatgcagaaattgtgtcgagggaagctcagtgccttgccctctgtcaacagccaccaagggatagagccagcttatcacctgggcttctttaggattgtccattgaagggttggtcaaacatggttgtctggtccaatctttctgttgaccatttagttagtgagtatcgtatatgtcaaaatgaattcacattaattcttgatgcagacacagccataacaaataaatcacttcctttagactttaactttcagctgaagtgtcagttagatatatgttggctttgattcctcttatttgccttctatgtccaaataactttaatgaatacaaagctttatcagataataatactttgatgtacttatttgctcactttgcataatttgtaatatagaaaaaaaatcttcacatgctattttttcttacaaagtaataaaccagctgtatttatgaaccacctattatgagcatgcatttccagcagcagtctctcagtaaaagactcaatcaagttagaaaaaaatgtattagtagaggaataaggttttccttaaaattatttttatacttaaatatgtcaagcctgtagtctgtgtccaaatatttaaagttaagtattacccatttaaaaaacaaatttgactcttgtatacttaaaataaattcaaccacataactattttattttgaagtttttatttgtttgtttttggtttttttgttttgtttttcctttctattaagttaggacaagaaacaaaagcctcccatcaaaagataaggtgaaagcctcccatccacgtttcatgcttgttctccctgtgtattttaaaatctttttctttgtttcttaaaactaaaacaaaataaaaaacacaggaacattattgagatgctatttagtaatattaagaatgtccctgtgtgtaaggttattgatactggcatttgtgaaattaacatagggacatcaatgagagatctataacaggaaagattataggcctgggagggagagatctgggtcaagttttagcttcttccctgagtttgtgtgtgaccctgagcaagtcactaaggtctctgggtcacactttcttcaaagacctgtacagtgagaccatgggagtcaatcattgttatatcttttcactgtggtctcctcttctttttttttttttttttttttttttttttttagacagagtctcgctctgtcgtccaggctggagtgcagtgatgtgatctcggctcactgcaagctccgcctcccaggttcacgccattctcctgcctcagcctccccagtagctgggattacaggcgcccgccaccacacccggcaattttttgtatttttagtagagatggggtttcaccgtgttagctaggatggtctcaacctccagacctcgtgatccacccacttcggcctcccaaagtgctgggattacaggtgtgagccaccacgcccggcctgctgtggtctctaatgagccagtttaatgtttcttgaaccaacctttgctgtttaacacttgcttatcatgtttttaacagggatttctgacctctttgtagaagatttatagttttttgttttgttttgtgttttttgttttgttttgttttgttttttgagacagggtcttgctctgtagcccaggctggagtgcagtggcacaatctcggctcactgcaagctccgcctcccgggttcacgccattctcctgcctcagcctcccgagtagctgggactacaggcatctgccaccacgcctggctaattttttgtatttttagtagagatggggttttgccgtgttagccgggatggtctcgatctcctgacctcgtgatccacccaccttggcctcccgaagtgctgggattacaggcgtgagccaccgtgcccagccagaaaggttcttcagttctttatgtttgaataacaccatgttgtttgtgtgtgtgtgtgtgtgtgtgtgtgtgtgtctgcaagagaaagcaaaagagagattaaaatagatttagaaaacaatcagaattgtgagaatatagaagggattcactaaaagaatttctaatatcactaaaatcctcagctgatgtatcaatgagtctgtgattagctaacaaaagagtgtttttccccccaggtggacaatttggactttatgcaggtgtgcagtagtagaaccgtgaaggtagatacaattaaagttctgagaaatgaaaagacactaggccacgaataatggagcttgccagtagcagcagctagtagatccctttctccacggggccaaagagtttgatttgatttccagctctcaactcctactcaaggtgcaatcatcagtcccctgcagggtactctaggattctggagacattaagaagcacagaacgtggctgcatccctttttccgaatgggctttggtgcaagcagttcgtaagtggctagtaagaatttattgttcatgtatgttttttctcttgggagtctgtaattattttaaaatattagccataaatcccatgctaatatatatataaatatatataaatacgtatttatatatataaatatatataatatatgttttttgtttgttcctttttttgagacagagtcttgctcactctgtcgcccaggctggagtacagtggcgtgatcttggctcagtgcagcctccgcctgccaggttcaagcaattctcctgtctcagccttctgagtagctgagactatagatgtgcaccactgtgcccagctaatttttatatttttagtagaaacaagctttcaccatgttgaccaggctggtctggagctcctgacgtcaagtaatccgcctgcctcggcctcccaaagtgctgggattataggcgtgagccactatgctaatttttttttttttttttttttgagttggagtctcactctgttgcccaggctagagtgcagtggcgtgatcttggctcactgaaacctccatctcctgggttcaagcaattatcttacctcagcctcccaagtagagggaattacaggtgctcgccaccacgcccagttaatttttgcatttttagtaaagacagggtttcaccacattggccaggctcgtctcgaactcctgacctcaggtgatctgcccgcctcggcctcccaaagtgcttggattacaggcatgaaccactgtgcccggtgctaatttttaaaagtattaatttgcttttgcgagactcaattgtatgccaaaaattacctcaatatttgacttggagactgtagaccaaacttgcatcattatggaaaaacaatatgcaaaatttggccttggcattgcccaaagtgtggtattttgcattgtactatttgtttctgtatgtcatggagtatgtatagtaataggaaatgatgagtatctttgcacaaaatgtaatgcttttactaacatctgtcagctattttgtgagaatattgccaaaatataacatttatcttggtgtatagttcaattttgcttttgtgagtgtttcttctattttattgccactaatatagcataacagatgtctttcagatgtgaaaaatcaattatttttcaatatacctcagtagttattagggcagattaatgtaaagtaccgtaagagtaatgtccaaataaaatgtcataagtgaacaatacaattcaatggagaaataggattgagttgatcttggtacctttgtggaaaacagggagaaaaaaatgaacaagtacaacaaaaatatgcaaggccatgctttgttgaaagatcaagtagatgctttagtgatagtattttcagtggaatggtcagctgccatggaaagttagggcaaggccaaaactgtttatgcttcatttctatcgacaaacacgtagctggtttctaatgaagatcaataaaaggtaatcttgggaatgggtatttcagtatccagaagtctttgcaggagaatatgaattatgaaatttatgaaagcctgagtgttaccttttggatgctggtgtttggcaagttcataacaatctttatgttacttatcacaaatgttatttgttttctaaaattttgaatttcaaggcctcaacacacttgagagagagctgccaaataaacttaaacactgttctacagcagaaccagtatgcccctggcacctaggtttagaggggcctggatctggtttcatggcacgagatgcatgcagtcacacagagccccatgcttagaagggaccaatattaaatgcttgatttgatgctctgctcctaccattctgaaattattaatttttgaacaaagggtctcacattttcatttcatagcaggtctcacagattatgcagtgagtcctgagggaagccatgaaaggatagggctctgtgatgattccaacctttctcacctgaatttgggtggcggctctgtagctgctctcctcataacagtgttcctttatttctgtatcccttactctgcctacattttcattctgatatggaggacagaccctctgggatgctaagttctctgaaaggcctgaagtgtcctccatgcttgacttcaggcacacgtaatgcctttgttggacatttatgccatgactcaccttcttgcatagttattcactcctccagctctaacactatgcgaggcatcatgcttagtgccgtgaatagagtggtgaataagatttagtccttgctatcctaagattatactttagaaggatagacaaccaagccaatggtcaaataaaagaagttatgatggtggtagaacagggctcacaggaacatgaaggaggagcacctaaggtggtgatatctaaatagagatctaaggtctaactgcaggtagatgtttcccctttggggggaaatcagagagtgttctagagagggaacagcatgagccaaagctcagaagtgaaaagctgccatcttcaggataattttctccgtagaaaattgcactactagttacattcagagtaggtactagccagagattcattttagagacttacaagtttgccagcagtaagcctatgaattagttaatggttttggctgagaggccaccacagaatatcctgcctgtactttaaccagatttttaatcacaaagttcatgtaatacatgtctgaactggaacatggacatccatggacacattgaaaatttcagtttagtgcttagaagccccaaacattgttgactggaggaaaaaatgttatattagttaacaaaggtatatactgctatggaatgaatattcgtgtgtcctcagcattcatatattgaagccctaaccactaaagtggtggtatttcaagttggagcctttgggaggtaataggtttagctgaggttgtgaggatggggccccatgatgggattagtgcccttagaagaagtgcccttataagaagagtaaaacaagaaaaaaatctctctctccacacacctgcaacaaggagaggccatgtgagttcacagtgagaagctgactgtctataagtcaggaagacagtccttgccaagaaccaaatctgacagcaatttgatcttggatccctcagcctccaggactgtgagaaataaatgtctgttggttgagctacccagtttatggtgtttggttatagcagcctgagccgactgagacaataatcggtactgagaagtaggctgatgctgtaaacaaacacctaaaaatatggaagtgactttggaaggggtgatggacacaggcgggaaaagttttgagatccattctagaaaaagctgagcttgccttgaatgttaaagcctactgtggtgagaaattagaaagaagataggagaggtacagagaaaacttccttctttgcagaatacataaataatcactaacagaatgttgatagaaatatggatggtaaaggcaattctggtgaggtctcagatggaaatgagaaacatgttgttggaaactggaggagggatggtaggattgaaaaaaaaaattcaaaagaaaaagaaaaaaaaagaaatgggaggaaagtaacccttgttataaaattacaaagaacttggctgaattctgtttgtgctcttgtgttttgtgacaggtagaacttgcaagtgatgacatttggatatttatttatttttctttctctctttctttttttaaatagagacagggtctcgccatgttgcccaggttggtcttgaactcctggattcaagcaatcctcctgccttggcctcccaaaatgctgggatctgtagcagactatagatagttcccaactgatgatggttcacctgattttttttctttatgatagatttgttgaggtattaaatgcatttttgacttatgatatttttgacttatgatgaatttgttgaggcacaagcctgttgtaagttgaggagcacttaaaatacatatcagtatctaatagtgtcccaagagtttgaaggattcttttgtagggggacccaaaactttatcttggctacaaattatacaagaaactggactcccgtacaactgaagtccctgtacagttgagcacctcaaataggccaagtaccacagctggccaacacagaataccacataagcagaaagttatctctgtagctaaaattcttcatctaacaaatggctttccaagagttcatttgaaggagaagacagaagtaagtagttggctaggtttttttgtgcctttgtagttggataagcattagaagtattaaagcctaagcctttcaaagagttgatctgcctggaaccttctgcagatcagagctctgtgaaagcaaatgctgactcattagctgggatggtgtgaattccagaattattgctaacaaatctatttccacttaaaatataaaaaagaaagccatgaaatgagaactgactttcccttaggcctctaacagtgctgtttggttacatattttgagaggcagaaaatgagtgaagaaaaagagccaccaagaaagattctctgcaggtgaacaggaaaaaaagtaacttattaccttgcttggtccatagcaggtttttcatttccctttaaaatgtgagaatttgatgactaagatactgctattactgttttcactgtaaatgagttgatggaaagagcatgttgcctgatagtaatctttcatgtgtatgtacaggtacagtaagttgataaaaataactgcattaaaaaggtatttagaaagttctggcagagatagtaaaatggatatatccaattttttgtgctctatttttgtacctgatgtagtcttcatccatggagactgagccctttttgttttcttggaaataaggcattttatctattgaaatgattcaatttcctatcagtctagactgtgatcttacacagtttagtttagttcatctgcagatccttctatttttgatttatttgaatccatgaaagttaacatgccattgtagaatgccagactactttcctctcccttttacatgtgatagactataaaaattatagcttaggttgattattgcttactgggcagtccagcacagataacccaggtgttggttcaaaaaaaaaaaaaagcattctggagtaattgacagcactaaacattttgcttttcagtgaaatttaagagttggtggttggaagctattcatatacacagcatcagcaggaaatccccaactctggatttttaagcatgaggctatttttattttttcattcctatttaagactatttcagaatacgaattatagactcctggttctcactttggagtaatttataatcttagaagattataaatatatagattttctaaaaggtctatccaacattgtattatttaaagtattgattatttaatatgaggtttattagtctttggttttttccctgctaaaattatttcatttatttattcgctttctcccttaagcaacttgtgtttattaactgctgaatctactagaatgtcttcctataagtattaagagtcctagtaaaaataacaacaaaattcataaacatgcacaaaatgctcaaatcataaggtaaagcacaaacaaaataagttaagccacagaaaggcagaagatatttgcaatgcatggacaggtgttaatattcagaatacataaagaacaaactaagaattaattaaaaaattaaacaatagataaaattgataaatacagacaggcaaataaaaaatcctaacagctcacaaataaaggaaaaacgttcgatctcattaatgagcagggaaatgtaaattaaaagcaaaataagttatttcacataaaaaatctaactatatgaaatattgccaagcatgtgaataaagagggactctcatgtccctggagaaagtttaactagtagaaatcttttagagtataatttaataatgtccagtaaatttgaagacacacaaatcctttaagagagcagttccactcccacatatatactctggtatatatagtagtagtgtttcactatcataatcttgcaactttgggacctgacatattagttagtcatgaaatcaatttttaattgagtagaatagaaaagagtgggaagtatcagagtgcatcatatgtagtaagaataataattgttttgtaaaacaatattttccaaaaatgtatgtgtatgtgtgtgcatgtgaacatgtacatttattttaaaatgtattgatttctgagaatcatagtcaaatatactagaaaagcactattgtagataaactcccacgtgtgaaaattgagatattttgtttataatagcaaaaaattagaaacaacccaaatgtggcaggagaaaggatgagaaaggcatgatatccccatataatagacagctgtacacagtgaaaatagatgatctggagtcccatgtattcatagaaatgcatatcaaaagcataattgtgagtttgcaaaaaaaagcaagttgaccaaactatttacattatgatgcctttataaaatgtttaaaacatacagtgatatgtcttatttagacataaatatatgtttaaatttattaaaatatgtacttatacatgggaatcataagcacaaaattcagcattgtgaaggaattgtgaaaagggattgtgaaggaatacacagatctcaatttatgttctgtttcaggaaaaaaacaaacaaaacagaggaattattttctcacatagcaagaagtctagaggcttagccaaattatcaaagacccaagtttcttccttctttccattctaccagtctcagtaggttttcttcatagtcacacggtggctactgaggttccaggtattacatgtagacttgccaagtccagtagtagaaaaagggccattttttttcatgtgtgggttttttgaaaaaagtgagcttttcctagacatccccagtaggttgaccagatgtgcctaatatgcttgttcttatatcagacactgacaagcacaatgggaccaacatggttgatgtatccaagtcacagggaaggaggtgaggacactggaacataattaaagctctaccagtgagaagaagaaaattctgttggaccattagtattggctgtaagtacctctatctgccttagggatacagaggtgaacagcacaagctcctgagtgagttctagtggagttaaaattctaatgaagaagactgataatcaaggacagttgaataagatgattttacatagagataaatccatgaagaagagaaaacaccaggatttatgagacagcaattggagagtgacctggaagccctctctgatcagacgacatttgagctgagaccagaattgcatgaagaaagcagccgtgagcagaactgaataaagggaatccaggaagagcaaatgtgctagtgcaggaatgaggttgttgtgtcggaagtaaaaaggaagtttggtatacctggggcaaagggagagaaatagagaatgggttacaatcaagactgtgaagcaatctgatttacagttttaaaagatggctatcacacaagtgatggtgatggctttttctagggttgggacagtggagataggggagaaatggacctactcatgttgaaatagtgaagagaaagtcaagtgttaaagaaggcaatgtaaagaatcaaagatgagcccagagtagcagatgtgacaaggtttgatttcaataaagtggctcttgggacggaactgaaagactaacctagacagggacgccactgtcctgtgagtagactcttccagaaagaaatagtatgatagtaggataagttctttgcatttccagagttcagcaaggcattcatttatgccttggtgaatatccacagcaagcagagtcctctttgctcaatgttcagaatccaacatatcaggtcctgttttcaggacttccagccgtgaggtagaaagtgctttaacgtatacttggttagcatgaactgctataaacccataaacaaattatggacagaaacattgaagactgcaaaaagatggaatggaaagaagattgccatcaagggcatacaaaatgactgtgtttgaataagtgcgtttgatacttcagcaggtaatttggacagcctttgtgcttgtctgacttcactggaatagtctacatacctgcggatctcgttgttgatacgcccatattgcttccagcgggtgctttacttacctgcaggactgggctttttcttttcctgctattacgctctaatctcctgtagttgcagcctccatcttgaatatgggatttagatcattaactttatatgccatatttaaaaagcaatttcaaccaatagatattagctattaaaataacttcttggttagtaaataggcccatttaaaactgcattttgatttctacatctgaaaatgaaagaccatagtattgttttattttatttttaaaagtccagaaaaaaggtgactatactattcttttccttcttaatccataaatgtgcaccaatataacatttattgatctgcatgcagcgtattggtaaaagatgaattgtccaagtaaactgaagaagacgcacaacatataagtattatataatataggtttcttttagttgcaagtgacaggaaacacaatttaaactaaaaaggaaatttgttcatgtggaactggaaggcctaggtgcagctggatgcagggactcaaatgatgttttttttctctccaactcagcttctcttccttgtcttggctctatttgtaaatggttgtccctttatggtgacaagacagctgaagcaattctagccttatgatctctcaggttcaactcctattttcaatattctggacaaaatctccttgcctatcattgcctctggttgcaccgttcctgaaataacctctgtgaaaaggggaataaagtgctctgattgggtcaaattcctacaacctcttgaagagggtattgaattcattatatccaaatatggggcctaacagtggagaaagggtgctttcctagtagggtattggggtgctgataccaaaataaatgagagtgaaagctgaggagtcagggaacatatgtgccctctaacagtgttagaggcagaaatgttgccatgtttggtttctaataatttgtcgaggaaaaattcttgtcctctaagatgataaatcattcagggagcttctcagtagtttgcttctgaactcccggcactagaggcaggcctggacttagagacagcagaaaggggttgcctaccccatgccacgtgcttgacatagactatctcattgactactcacaaatattttattagtagtcctatcttttaaatgaaaaacagcctcaggcaggctaaggaacatgtctaagttcatgcgacgacaattgaacagcgtggtgcctataggtaataatggggttctgtacatttcagtatcactatgagagtacatttctaatgttctcatcacaaaaaagttgtgtgatgcataacacataacatgaggtgatgaatgtgttacttagcttaatttaatcttttcatattgcattaaaattataacactgctttgcaccccataaatacatacaactataatttgtcaatatataatatgctttttaaagtgccatagtctgtatttgaactcaggtctttctgagggtaaagcccataatctcacctttatagcatgccactgtcttgccaaacacaactcttaactcacttactgggtcaagctttaatttatttatatgtggtatttcaattttgtgccgtaagcctagtggcatcaattttaagatgtaggctttacacatattgtaatgtaggtgttaacattctttaagagtcttaacaagaaaattattagtttctcggtaagctttcattccccaaatatgtagtgaatacctattctgtataagaggacaagagcaatatgaaatgattggctatgccattctgggatggttttatcataatactaagaaaaaaatactctcctggcattccactacagtccaatccaggcttgaaccctcagaagaaattatgaattgtggaacacagcaaactacctcctctgtgcagggctaaccacttctcccttaagatcctctcctagcgtggaacagcgtggtatctgcagccatcaccccagatagtggttcttgagtttgcattgttgatatgtcttctggatagtgctgccctacagagaacccatcttgttttgttcccattcacatttccaggacagagcactgcccagatacatgttaggtgcacaaatatatctcttgaattacattaagtgccctattacagtgatctgccatagatatttggtatagcaacagcattgaacatttaaccactggtaaaattaatatgaaacacattgtattttagaaagtatatatgcattaaatatcacaccacacatacaaacacatattatgtatcccctaatgtatgatttatatgtatataatatttgacatcacagatacacacaatcctttatatacctttatgtatatagattgttctgtaattcataacatttaaggcttttgggattttgtttttaaacaagtattacagcttaaaacatttcctggggtttgaattctcattccagcattttatggaaccataaaatatgaccagtttacctcttctaccttttctaaacttctccctgctttatgacactgaaaacaaacacacatatgaaatgaattatgtttaaatttctgggcaacattttcttagcaagcaacaaaaatatataattctatttttcagaaagtaatttagttctaggaagctgagctgacacataaccaattaatagttgaaaaaaaaaactaccatttgttgtcaagctcttttaattttgctaaaactgggtttgcaaaaggatattgagaaaacattgactgtaaatccttaattcccattttcaaaaccttgtgataatgaataattctttatgatttcttcaacaagtaacatactcatcgtctttatgcttcctatcttttttttttttcaatccagaagtgtgatcatgacaaaagtctatgccaggaatatgtcgatctgacttaatgctttctgagactgttgtttctctccctgatttttgatacttttacagagataatagctacttcctaatctgttttttacttccttgtttccattttatgtttcaatgaaacagcagaatacattacttcatcttaattttcctacttacctgtgtttgttgttgttgttttaatgtgatagaatgtgggatttttactgtttggaatagcaagagagctacagatgaacaaatggaggctaatagataataaaagacttttccaaagacatggactaattggtgcccaggttcagcttgcaggatttcagaaacagcggtgagttaagtcagcaagtcctatggactcttgagagcaagctctttttttttttttttacatttttttattatttttttaaaaatcaatcacttactagaaggcagtagaggctattggttaagagcacagactttggactcaaacaagctatccttggaatttaattctgctgcctcccttcttagctatgtgatactggggtaagtcacttaacttcccagtgtgcttcctgtttccatctgataagttatggtgacattactgagctcttagagtttaggtaaagattgtatgtagtacagcctggctcatactaagcaatgaataaagggtggctaatgctggtttttattactatattttcttcttatactttgacaagcattaatagagtaagtaagcatggctatatggaactcaataacttggaaagcatgatgatggatgacactttttatgcttctattttagccaaaacaactgtttacatatcctgtggattatttaagcacatgccacattgctacaactcatggagtggccttattctatacctaatgatagctggcctggccatgcctcatttcactgccgatttccttctagatactcctagaatccacttattctccatttttactgccactaatctagttcagagtttttatcatttttcactggttctactacaccatcttattgaatatctttttgtttagcaaggatattaaatctattacctttattttgaaccagagaatttttttgaagcacaattcaaatgatgtaatgctcttggtaaatctctttcacagaaccccaaactccctcagagaagagtgatagtctcaccatgatgggtctttttctgtccttctctgtgtctgtaagatagggcagaggaggaaagtgagggtcaggaaagttagataattagcctgaaattacacaactagtgagtgacagaacaaggaccccatgccagatgtgtctgttccacagtccagatctgcacagttattaccacagttattacatagatcaaggatcagccaactaaagcctgtgggccaaaggaatcccactccctgttttgttaataaaggttgattgacattcagccacacccattcactttcatattgcctatggcttcttttatgcttcaacagagttgagtggtcatgacagagaccatctggttcacagtcaaaaatatttactatatggtcctttatagaaaaaacattgctggcacttgacatagaacatacttggattcaaaagagtaaaagtgatagattcctggatgttcaccgtgaggaactctgtgatcagagtcgtctgaaactttaatgaggtggatgaaatgtcgctttaacaaccagaagaattactcaagtagtaagacctaaatatactaagagattttaattacctagatatctattgggaaaacatcttgacaggatgcagattgtccaatcagttatttttaaagggttgctgacagtgcttaatgtggaagaggtaggaagctaaagagatggcagggctcctccacctgactgtgccccagaaagaaaagacgattgcaaacaaaatgggatatgtcatttgtagaggcaggtactgtgaaataaatggcagaattcacagtgctaaggtaggggattagaaaaagcagctgaacaaataaaacgaatcttaagaaagtaaccttgagtacaaaatgttctgagcccaaaacaactgcatatatgcataaatacgtgcacaatcacctgttgaatgcgctcaggaactttgcagttgacctacttggaggggaaaaatcggcatactcaatcattcagaaaagtcaagcatttgtttaaatcaaatatgccaaaattccaaaaagaatttagcatgaataatatttttcacaaaggcgaaaagccttctcgttctctgggagccgttttgtatttgggagattggagagcaaaaaggcaagtgccgtttgtgataataggttctcggagggcagaaataaattatgttcagaatgtacaaggaacatgatgatggttaagcccttagactgtatgtagttgtcctgctagagaactcaaagtatggaaaattacaaaataccattctaagtggtctagtgagtgagtgcagcttccaagtgctatcatttaatttactttcagggagtaatgtgtgtgccctgggtttgtcttgtcaatgctcctgtgcagtggtgcccaaggagaggccagaaagaacttgaggagatctgttggttcctttggatgaagaaatgaaatagaccattttttccttggtttcctcaatcatgtttaattaacttttgtcaagggcctgccgggtgccctgcactggaattggggacatcaagatgagtaaagatctatgtgcgggagaaaaggcaaaatcaaattattgtcatacaatttgatgaattaattctaatactagaggcaatacttgggccagaggctgggtgaagggagagagaagatgaaagacagaagcaggaaggagaggtttagaaatagggcaaagtcacagcatctgtgtgaccagactcctgtcctcaaagtaagtgtttgtgaatactgggctatttatatttccatatattttgtggaaaaccaaaaagtatgatggcagtcttgtggcatgttcttgcccttcacgcagtacatgcaacagaaggaaatatgaggacataacatgtggccagattctccttctgcgagggactatgcgtgtctctgaacatggagaggagaggcctccatcaaccctcctgtgcactttccagcagcttgtagttgggtttgagtgacaaatgcacctccctaggtctgagagccagttacattgctgccaccaatactcaaactccattggctttcttagtagcatataccatttttctaagaaaacaaccaccatttattgattacttactatgtgctggacactgtgctcagcacctgcatccaatacttatttaatcctcacaattattctgtgaagtaagagtcattttacccatttttgagaatatgaagtcacagagccacagagtattgaaataactttctcaaagtcacttggcaatgtatctgactcacacatataatcaatcttaagtctgctgtatttcagatattttttacttccgtagtgttttttgtttgtttgtttttgtttgtttttttttttttgcgacggagtctcactctgttgcccaggttggggtgcagtggcgcaatctcggctcactgcaaactctgccacctgggttcaagtgattctcctgccttagcctcccaagcagctgggattacaggtgcctgccactgcacctggctaattgttgtagttttagtagagatgggtttcaccatgttggccaggctggtcttgatctcttgacctcatgatccacccaccttggcctcccaaagtgctgggattacaggggtgagccactgcgcctggccctctagtgtgttttctattattatttttaaatatagtacttaaaacttatttaaaagttctatggttgaggcaaatccataataactactgcagagtttgaatgctggaatattagaatattagaatattctgggtctagaatatgtttggtcctttccaggcctgaagggaagacagtttccattttcattatgcactttggaagatgccagagaaattaggtgggcatcacatacaagtatcactgttttcactgtagcttttgttttagagaggacaacttgtaaaactttcagtgaacttaggcaaggagcaagccaaccctggcagggcaggccctctctgcaggaaacccctaactgggaggtgcccagctctggcaagtctttgaactgtcagatgccaggtgctgttagggcacctccactcagcccctgcctaatgcaagctcttgaaaactcagagatagcttcctccttcattagcatttgtgctctgtactgaacacaggtcaaagggagatgttaaaatacaccccagagttcacagggccaggatttgaccctattgaaacctgataaataccacccctctattgttctctgggtggaatctggcaccagggtgagaactgggatatgactgaaagattttgttttattgctatcttagtctattcattgttgcagagaccctgacaggatttctcttatctgtgatttgacaaaatatatcttcttaatcattgcacggttgatgttaagagggttcagaagtataaaaggaaggaacttggcttagaaataaagcattgagggactttaaaattaggccactggatagacctattagcctttaaagaggctgagaaattttgatgaaggctgggcctctgaaacgggcaactcttctaattttaataatgcatttgaaattattcttatcacttagtgaattcttatttgattgccttgaggcctttttcaagtttcagattttaattcctcactactccattaggaaggttggtcattttatgttcattttactgttaagaaagaaaaaaatgcagtgagatcgtacaactaagaaatggtaaaacccagactggaactcagtaaatttgatatcaagccctgtgatcttaaaaaaagttactgtggttaaacacgtataacaaaaatttcccattttattcaattttaagtgtgcagtttgtggcatcaagtacattcacacggtagtgcggccaccaccatctgtctctagaacttctgtcttcctaaactaaaattctgtactcattaagcagtaactcttccttaatctctccacctatcccctggatactaccattctgctttctgtctctatgaatttaactgttctaggtatgtcatataagtggaatcattatatctgtccatgttgtagcatgtgtcagaatttccttttttttccaggctggataatatttcactgtgtgtgtgtgtgtgtgtgtgtgtgtgtgtttgtgtgtgtatttatatcacattttgcttatccattcatctatcaatgaacacttcagttgttccttctggctattgccagtgtttctatgaacatgagtgtacagatatctgtttgagctcctgctttcaattcttttgagtatatgcccagaagtggaattgatgaatcatataataactctatttttaactttttgaggaaatgcaatacattttttttcccaaagcagcaacaccttttacatttctgtgctttttttgtccatatctaagttgccttggaatgatgaactagctgagaaaatagcactgctggtgtaacaatgccatatgtagctgatctgatgcttttattgtgtattggtttaacacacatgtatgtcatatggttcatgagcatttacaaatgatatgcttcctctgctgcttaaaagtcatattgaataaaggggcatgtttaactttttcagaacacttgaaatatgatgaaatgtcagtgtttttgaggcgtcaaaacaaatgacataatgtcagtatttagaaactcaactatgtgtaaaacaagttgcttttgttttccaccaggcacaccacagcatgtttaatgatggatattattgttgtgaattgtatctaatctgctccagactcagaaagcctccaacacaaagtgtcatttgttcatcactttgtgggttttgcctgtttcttacatacaaaggttcactaggagttgaacaaaaaacttaaagataggtatggggttgtgtagtcttgaagtgtgtgtgtgtgtgtgtgtgtgtgtgtgtgtgtgtgctggaggggtttttcagctgttctttttatttttatggaacaggatatctccagatgatttcatttgaagggggaaagctccaaattattccaaatgggatgattccatttggagatctttcctcttgcttcaggactgctagtataattcccagagaagcataagaaggccacagctatgcctaaaggagttaaagctggtgcctaatctttgaagtctggcaggcctacctccaccccaaagtcagtggtcaccgctatccaaggattcatcaaattgtgactcacagggtggagaaggctggctttgagagaggtgaatgtgcatcttcctcaggaccacagttgtggggttagctgtcctgcatcagacctctgtctcattttcatgatgaacatcaatgtggtagacacaccgtaacctgacccagaatgagcagggctcttttgtagtcccctcctcttgagtttgggcaaaacccatgacttgctgctagttaatagaatatggcaaaggtcatgggatagtcactcttgattaggttatgttgcataagacttcatcttagccagctggaagagagattcttttgttggtcttgaagctgccatattatgagagggggatgccaaggaatgggccacctaaggaggtgagagtagttcttggttggtagccaacaagaaagtgaggacatcagtcagtcttaacaaccacaaaggactcttattgacagtcatgtgagcctggaagagaactccaagctccaaaaaggaacacagcttggctgacactttgattgaatccaattaagccatgcccagacttctgatccatggaaaccaagacatacaaaatgtatttttctaagtttctatatttgtggtcatttgtcacctagcaatagaaaactaatacaatcaagcacacctttaatgttaccttctctttccctgcttgttcctttcatttttattttgcctttttacctgttttcttgttctgtggattctgtctgatgagaccatcaatcaagatgccctggtttcccccagtgaggagaaaaacacatgacccaaactaggccaatcagatctttctctccaggaatccaaatcttaagaagaatgaaaaagaggctgtatgtgtttggagctgactgatcccagcagtgttgccctgaaacactcttgctaccaattctcctagagagttcctgccacctatctttgccaattcctattccctaacttccttttttattctgtgagctccactagattcttcaaatgaattcctcttctgctgaaattaatcagaatctattctatttgttgcagtcaaaaaattcctattgatacatagagccctgttgtaatcacctcatacatttttttgtctctctgggttgtattatggtcttttttctttctttttaaacttcttttgacggggtctcactttgttgcccaggctggagtgcagtggcactatcttggctcactgctgtctccctcccttgggttcaagtgattctcctgcctcagactcccaagtagctgggacaacaggtgtgcaccaccatgcccagctaattttttttgtagagatggggtcttcctatgttgccaaggctagtcttgaactcctggcctcaagtgatcctcccaactcagcctcccaaaacactgtgattacaggtattagccactatatccagcctattgtcttctttctaaaagatttttctcatcactaagtgttacccaaacatgcagggtttcaaggtaattcttgataggattttagaatcagaatcctgattctaaagataggattttagaatcagaagtctggaaatgatacatgaaaattgtcaagttaccttcttaattttaatttaaagaccacagtttttggttaagtctcataaaaacatctttagacttaggataaatcagaagatgtatactgtatgtagcgatgaaaacataattttttaaactaggaaaataaagagtacagaatggctcccagcagtaaattttctagtttcttaggaggaaaagaaagatcagttggtggtgcaggttttcttgatcttcaaagtgagtgtgtaaagacttctatttcctggctggaaacatcaaagacaaaggaggaatcttaaaagaaataaaaactctagaataaaattaaaaataagaattgaaaagtagagagaagtacaattccactgttagaattaaaattttttgactcacttcttgatatacagaccttctttccttcctggtaaaagcctatttgaaaagtgttacgaagtttctccctcttgtatcttgtcagaatatacaaaaattcagattacagttgacccttgaataacacctgttcacactgtgtgtgtccacttatatgtggactttctcctgcctgttcacctctgagatggtaagaccaatccctcctgttcctcctcctcagcctactcaacatgaagaccatgaggatgaagacctttttgctcactcacttccactttagaaattgtaattaggccagtcacggtggcccacgcctgtaatcccagcactttaggaggccaaggcaggtggatcacttgaggttgggagttcgacaccagcctgatcaacatagagaaaccccatctctactaaaaatacaaaaaaattagctgggcctggtgacgtgtgcctgtaatcccagctacttgggaggctgagacaggagaatcgcttaaacctgggaggcggaggttgcagtgagccaagatcgtgccaatgcactccagactgggcaataagaacggaaattctgtctcaaaaaggtagtaaatgtattttctattccttatgattttcttaataacatcttcttttatctagctgactttattataagaatacagtatataatacataactgtatacagtatgcattaattgaaagtttatgttatccataaagcttctggtcaacagcaggctattagtagctaagtttttgggaagtcaaaacttatacttggattgctgactgtacagggtatcggtgtccttaacccctgtgttgttcaagggtcaattgtatattctttttaaagaagttaaaataagactgttaatacttttattgcactgttcatgacagcatgtcaagtatgataaagcattttttttcttagtttaatttattgaattgtaattaaggtatttttcactgtagtcctaagaatgaccatgctaaaactgtcttgacaagtcctttgctaatgccttaataaacaacattcaacactgttaaagttgggaacaagtttgaggtaaaatttgtgtccatgagagtggacgaatcatggtaaagaaaataatgtggagaaaatatataagaaaaaagtcaacaactgaagagtagatttttgaaagttcagtgggttttgctttgttctagggccaattttagcttccttattaagcattattttgtcaattttcctattagaaaaacataattgagattttgttttgggatttctagaagaaatgagttggtgtttttatggtgtttccttcgaaacccaaaactgaacatggaactgaacatggtcctttacaagatttccctctcttttacatacattctagagtagataaaaatgaaatgaatcttagagctcaggaaatatcgcgatttcaaatggacaatccttgacttttttgtcacattgtttcttcgtggaaaaactcattctctctcccattccaattttccagtagagatttgattgagtcttgagcatgcgttgaccatcttcatatcatgtattatgactgaagtattaaggatctaaaaggtacagagatagattgcacttagcttaggattgttacatgcactctcattcaatgtttggacaacttgatggaataccctggaaagtttgccattatctttccctgtgcattggctccatagacttaatgcacctatcttatggatggaatgacgatactttgtgcttggagacctgaaattgttgctttgtagccctttgctcttatttagccccagaaccagaacttctagaatgaaactctagtaaagaatcagtcaatgttttttgtttgtttgttttttccccactccaaagagaatgtgttttacttttttgtggctctgaaagatatgccaactcaaactcctaggtctctcaggattgatgggtacccttttatgttgcatcaaaattgaagatatactagtgtaaggtctagctacctttctagaattaccatccaaaaaagctgttaatttaaaccctacttcttaagccaagcagtgcatctaaagtgagctttttttaattttaaatttttttttttttttgagccagggtctcgccctgttaccaggctggagtgcagtgttgtgatctcggctcactgcaacctccacctaccaggttgaagcgactctccttcctcagcctcctgagtagctaggactacaggcatgcgccaccacacccagctaatttttgtatttttagtagagacggggtttcaccatgttggtcaggatggtcttgatctcttgacctcatgatccgcccgccttggcctcccaaagtggtgggagtgcaagcatgagccaccatgcccagcctaaagtgagctcttgactgaacctattactgattggactttcttggaagcactgaatcctgactgtatccagcatttcctaaaccaatgagaattctccttaaagcatttgtcctcagtttcaaaggaaatcagttctgagatactctttttctcttataggatactattatggtcttcagacattcactgtatgaagggtttaggttgtagaacaaatcaaatatacttgaaatgcattttgctttctgagggactatggtgtgcttttcttcaagacttgacaaaatttacttttttaaaaattaacttcctcctgtgtttacaccagcttttatactttgttggaaatacagccacttccagagagaatttggcattgcacttatcaaacaggataacttaattattggcacagattattttttatttgagcagtgtgcactgccatgagagagcatccacattttcattctgggcatggaaacaatgtaaaacaggtttggcatgaagcatgtatgtatgtgtgtatgtgcatcaaactctaccctatgtgaaaggctgccaatttttaaaatccttgggaactagagtaattaatctcttctgttgcctataacaatcggaagacctgggaatatttcatccatttgtaccatttggaaaccattattggcccatagagattgatacttcaagaggagtggtctcttgccagcttacttcgtaagttttgcctatctagtttcaatatttcccacccttctctactttatgttgtatcttttccttgggttaaaggtttttgtcagcttcttctgctttgtgcttatatttttcttcctatttacaaaagctcatcttccctcgccaatgaaacaagttatggagtgtgtacatctacacctagctggctctgctgttgtacagaggtgcaaacagggctgtgattttagacatagtagtgtcaatagacatagtagtgaggatgacacagcatcccacgggacaagattgcagtgatgttatcctcacttcaattcaactgcatgactaacaagaacattacagagaaaaaaagaaagaaaaaagattaaagattaatgcttccagtcagtcatgtcccatggggagacatcttagaacccattctacccattgtgaccacacatatatagcagtttttgagaaggaatcaaaactcaagaataaatgacatgttctgatatgttaggcaaatgtcagacaatgacacagagccctaagttaatatttgggaaactaaacttttgaagtacttttatacaaagcatatgctaatatatgcagactaatgcaaattatccataaccttgaggtttctcacaggttgacagtggggtccttggtgtcacagaaggtgaccattgctggtatagattctgacaattacttggattatatcatgacttcatatttaatgtgaattttatctacttagtctgagcagttgctcatttgccaacagttttgcttgtgtatataagtaaacaaacatatttatcacccctaggatcagtaaacgctaataaagttgctgctgcttgcactttagatttgttttaatgacagacacatcctaaattaactaagaatggtttgcttgctttagagcttagcaagaaaggtaaagatattagcatgattcgttgtcaccaatcaggttgaaatgatggtacatgttattctttgtcatcagcatactctatcttagactgtatttttaagggggagtgtgtgtgtgtgtgtgtgcattcatgcatgtgtgcatgtctgtgcatatgcgcacacattttctttcatgggagttctgatgtcactttttgacaaaattcattgtgaactttatctcagactgcagtgaggaaaaccaacagactgaacaaatgaacaaatacacagactcttctcccctactttatgtaatattttatatgcgttttatttaaagccagcactctacatgcagccatcatgaattatcttgtgtgatgtgcaatatttgttaaggtgtgctttgcaaatgctctcttattcaactagttccctgaatgggctgaaacatggtcatttttgttctatacacagacagtatattaaaataaggattaaaaccatgtttaatcaattgttagacttttatcccttcatgttactgttccatctttctttctgccctttgctgatcatctaaaaataaatttgtattctctgaccaatgaactcactccattcatttattaactcttttacagtcttgtttctttctgaagtggtagaaacacttaatagcctactctagtgaactttcttcagaccatgtcttctttaacacctgtcacactcaacaatgttgactaccctctcttaggtggtctttgctgcgtcgtttgctgtcaaccattaacaccatacctgtatccagaagcgctgtcggaaagccaggtctgctgatattgattcttttggtctttttctgtctccactttggcctctcttttccatttctccattgcctgcatgttttcttctttttctgtttgtcaattccatttgatacagctattctatgaagaaaataaaagatattgtttaaaactaaaaccagttatatctacttctatcttttggaaaagatataatgcgtgaagtacaggataggtagtgcttacaatttatttttgttttaagaaaatgcccaggctgggctcagtggctcacgcctgtaatcccagcactttgggaagccaaggcaggtggatcatctgaggtcaggaattcgagaccagcctggccaacacggtgaaaccctgtcgctacaaaaaaatacaaaagtgagctgggcatggtgatggatacctgtaatcccagctatttgggaggctgagagaggagaatcgcttgaacccaggaggcagaggttgcagtgagccgagatcgagccattgcactccagcctaggcaacaagagtgaaactctgcctcaaaaaaaaaaaaaaaaagaaaaaagaaagaaaatgccctaaggagacgggtaggtcagctcagctgaacaagtgtagtcccctggagtctactctatgtctaggctaagttttcttaggtgtttcgcatctattatctttttaaatccttaccacagcctgtttgttatttatcttcattttaaacataaaattactttattttttcattccattgagaaagtcttctaggtgaatttgaaagccaggaggagttgaacatgtttggcattcctcaaaagagaaaagaaatgagggttcagaatggtgaaatttctgaaactaggatgatgacttcaaaagatgatttatgatacttaggttaggatgttgctacatcaggttaaatgctgtcattggtttttgttttccttacaaagaagaaataaatttgtgggtgggggtagggagttactcaaacatacctaatttctaatactctaagctacatatttaaatacactattatttgtatttctcagtttcccattgtttttaatgtgcttttcttaacacattaatgatagcttaaaattaatattttcttcatgctaaaacaaacaaaatgatgagagaaaatttaggtatccttgtaagctagttctcctcttttctttcaatgtaataagcttctttgtgaccctggcattaaaatgttttgaaatggttattggttcacggacattaggctctgtaataccattttccctatcatctggatgtattgctatttgtttgaaggcacattccaccattattggtgccctcactagcagtgagggatgagcctgagtgaacattgggaataaagccagttgtttcctctgctgcattacaaggaaagttattcaggaacatgcccactgtggcaaatttaccaagtggaatatttgttgccttgacattttggactatctactggcatgaaaagtcaacagagaggtatttctacacttgcttaggaattatttgattaaatagcattggaggatagaaataactgttttgttttattttttacttaaggtgtaatcctcttagtcaaccgaagcttacagtggcagtggtattcattattttactcagatttttattctttttcattaatgtagagctttgtacccaaatgcattctatacatgtctctcattacttctctggcagcaagatagcacttcactccacccccaaactaaacagaatttaatgatgggcactccttgcctcatgagggggaaaaacacagtttcctggtcgtggtctctgaactgcaaagacacacttgaggtttatccactgagtaaataactagggtgaaaaagtctttgcctctgcagcatgaactaatatgacccagccaaattatgacccacctgttgatactcttaacaagtgtgagtaggtaatatcatgtttatggtgagtccatgtctctgagtaatttagggctgtgctgctcaatagggtagcccaagccatatggttctgtaagtttacatttaaattgatgaaaaatttagtttttcagtagcgataactacttttttagtgctcagtagccacatatgacccagtttagaccaaagagacttgaaatgttttctggggctcatagttgaagagattttcctttcctgctagacatggacaacaagctgcagctcttggaagctgtaggctgccatcttggggacatggaaagctgccttaggaagaaggaaacactaagggtagcaaagagaccagaaggaagaaattttgtttttggtgatagcatagagctgccacatcaacacttgcccaagacctgttctatttctagacctattatgttcaatactgtggccactagcctcctgtggaaactgagcaagtaaaattcggctagttcaaagtgagatgcattgtaagtgcacaatacacattggattttgaagacttagtatataataataatgtagattgtctcattaatccttttttgtattgattgcatgtttaaaggttaatattttggatatattatgataagtaaagtatgtgaaattcattgcacttattttttaagtatggctactaaaaaaattgaaatcacgtgtgtggctcacattatatttctattggacagtgtgacttcagacatttcagttaccttaacaataaattcctttcattgctcaagtcagtttgaatcaaattttctgctgcttgcaacataaagatttctaatcaatgcttggcataacatttctatttaaactttatttctgcccatttatgcttgcaaccatgacacacatacaaatgtatatgtgtgtgcactggcactcacacatgcgataaaaagtgctttcctgtgttcctaaatatccatctgagatgctagctcattacataaaactttctgactctcagcttttcacatctgaaacgtaaaaaaaagatttgtaacttagatatttccatgactatattcattctactgattattttctgtgtttgattcacttttatttatacactgaattgtcattaaattgtcttcttatttcagttttggggtacttttcttctctctttgattttttttgatgccactaaaattacaaccatttacttagctagtaagactgcatgtaagtggcagtgaagaatgaaaaagaaaactatccagtcaaaagaagtaattttaaaaatgttggagtgtgagattttatactataggaaagtaagtcactaccagatatgttatttaaagattttctttaaacttttaagcctatatatttaatttcctagtttttttttttttctaaaaaaaaggcaaagataaaattacaagctttaagataggaataaaagtcatttggtcatctgtttatgactagaaaacctttatgttctatgaaatgcatatagattaagggaaactatatatagccaaccaaaataaaacagccatgctgtgtgttttatcaaattacttcttaaaataggaaaacactcaataataagctgcatatagctccctaattactacagttttactttatatgatgtttaagggaatttttgagatatctccttaccattttttctatgaaagtgataatttaaatataattttatagcatatgtttttatttttatatttcttccagttctttaggacattaatcattattgaaattttgtccttcccccatctcatttctttgctttttacctccctggctttctttgtattgaaaaagctaggttccttctaggagagaagtgtcctatgtatattctgatttcttttttgtggagaaatgagtgactgttgagtaaagtcatgatggaagtgccatttgaaaaaaacacaagttcattatatttcgttattcatcctaattttcaagtagaattgcagtaagctaatcattgattagggtgctgttagagttggcagttaggaaggtaattctgtgagtgaggtggaaattatttggctaaataatgtggttttccacctttcactattataccgcttttgtgaaatatttttaattttgattatagaaagttttaaaattaaatagttgtgtataaacttattgaatgtaatccctatatatatattaagttctcatcgactgcatggcactatgaaagactatgatttggaaaacctttcattttcctttggggcaagtaccaatgactgtgttaaacaaagtaattcctaaatatggccttaaactctcttccccaaaacaaacacattcctcaaagtaaccctgagtgagcagaaaagcagtagtttactaggtatctctaaaccatatgcccatatcctaaacgtaggggttaagatgaagattttatgtgattagattggacaaatatgggaaatccactcattcatttattcattcattcaaccaacatttatcaaatacttatcatagtgaatctatatcaccaagaagaaagtttgggaacgtttctgctgaggaaagtaggggttatattagcaatgttttattttatgtatttgataccttgaatggatcatttttaccatactttcctctacaagataaaataatttactgtagtaatcagtaataaccggtattttctcttttcttcttgagatgtaatttacatatagtaatactcaccattttaaagtgtataattcagtgtttttttacattaaaaaggttatgaaactgttaccactattgaattccagaacttgcatcattctccaaaataaaccttagacccattcatattcattcctcatttctcttcccccctgtcttctggcagactactttctgtctctctaaatttgcctatcctggacatttcatataaatacagtcctacattatgtggcctctgtgtctgttttctttaacttaatgttttcaagattcatctatgttgtagcatgtatcagtacttcattcctttttatgagtgaattaaaaatattccatagtatggatatagtacattttgtatatccatttatcaattgttggacatttggattgtttcaactttttttttttttttttttttgctcttatgaatagttctgttataaacatttgtgtacaagtttttgtatgaacatatgttttcagttatcctgcatatacacctaggaatagaattgctgggtcacatagtaattttatgtttaattttacaaggaaccactaaacagcttttcacagtaggtgcatcagcagcagcgacgtatgcaagttccaatttgcccgcatggttgccaacacttgtagtttttgcttgtttgattatagccaccctagtaggtgtgatgtgtttgatttattctttagtttagaaagagtgaacaactttttaataaatcataaatttaaaattatataaattattttgatttaataaaatttgcatttttatcaaaattattaaaatcttgcagcttacagtagttcactcaaatattgagcactatttaaaaatgcaagaattcaaatagagtaacataattgaaatagctcaaagtctacttgtctgtaaattcagaggctattattgttcattaagagtcttctgattacaagagaagatatgtagtaccacatagacaaaaactatgcctgaaacaagtttgaataattacaaagaattgtgaacttactctcaaaacaaatgcatgtatctgagtcctcatgtcccttgggccagctgtataattgggacttctgtgaattaacttgtaaaataaaaggataatttaaaaaaaatctaagttgaagcttagtatctgctacagttgtttagaaattaggtcagcaaaatattttggtaagaggaatagtctataactgacattttgaattacagcacatgttgacaataaaaagcagaccaaatttttttagttttattattgtttctaaattttctatatacaacaaattcccttattatgtacacctagggcagaacacttccactgccacactcttggttttaaagcctttttgtttccaaagggaatgctttatgtattacatggaaaacatcttggtaaagcagaaaacttttctgatttggtttccaatcaggaaataactcttcaaccaaagatcctagcccaccctttcatcagagtgcagtagaagtgactggtgcaaaataaataaatgctagaaagaagacagtaaagcttacatagataacctcagggtcaacccaaactattccagagtaataagaaaaacattatctaaaacatattctagagagcaaattgcattagttatctactgctgcataacaaattactctcaaacttagttgctgaaaataataaatatttattatctcatacagtttttggcattcatgagtttaagaacaccttaggtgagagattctggctcagaacctctcttatgagattgccgttaacctgttgatgcagcagtcatgtgaatgtttggttggagctggaggctctatttcaaggcttactgatgtggttgtttataggaggcttcagttcttctccttatggtcctctaagtgaggctgctcaccacttggcaactggcttcttcccaataagtgaagaggtaaagggaggtggatgggagagggcacacaaccaatatggcagctacaatgtctcttacaactttttctcacaggtaacataccatgacttcttgcaatattctattggtcacccagaccaatgctggtgcattgtgggaggaaactacatagaggtgtgaattacagagggtggggataattaggggtcatcttagaggacaactaacccaccaacctccctctacttacattaatttataaatttagatgtttattattagaacacactgcttcttctagaatgttgcttattcttgtcttctctatagttttctgagtaaagtattaaagtctttaggaattgctttacttgggctggatgggctctgcttagtgattagagtcacctactcaccgtatcttttaactgaagttgggtgtccaacaattaaccttccaatttttatttcaagggtagttttaaaaagaggcaggtgttttagctctaagaatacctgtatgtttttagaacagagaaagtgggaacaatggagaatgaagtcacatatattttttaatcttgtttttacagtaggtggttttaagtcctaccatatgatggctggtattttcgagaattgtttctttctatcagtagaaaatgtgtcccttccaacgttccattacttgaatgtctgtgttaacctagaaagacagtaggagactaaaacttgtaatattttcattacttgaaagattaaattatgttttattgtatgagttctttagtattttccctggataggccttttcttcccatcacacaaacaatagagacaactttatgaaatatgagagaattgtattttaatactctgaggtaggatcaagctactttcatcagttgatacaattttcccctaaagaaattctagctgtgagggccaatggacttgggttacatataagaattatatatacattatcatttgcttttgaaagtaattattctaaggctaagttaggtttgaatttgattctgaacaatgatgatgcatttgaactgttagggtaattaggactatatcccattcacccacacactctttttcatgtgtagtcctttaaactgcacagcctttgaaggatggttagtttgtatctggggtttgtgttttgtttttttttttcatctactttttgattgctatgtcattgaaaagtgcttaatcacagagaggattacaaaataaaatcaccattagcataaatcatttatactcattttaatgcttccttcttgtttgtggagttgggtatttggaagagtggagaatatataaccttcttttttagtgtattttgtgaaacagtttttctctcctattttgttttaacatttaaaataagagacaaagtcatcagagtcaaattatgtatttacatttttattagaaaaataattggttagatgaactggcttattaatgtaacataatttattttggaaaattttttaaaagctaaaatctgtatttaatatatggattgaagaaactggaaatatatgaagatatactttgtattatacttttcatccttagaaatgcactgttatattgtttagggagacttcattcagttcctaagtaatttgtttttaattctggaatccttagaaataccatttcagtggtataactaatgggcaaactggaactaacggaaaggaattttatttctttattcctcccaccaaccccaattccttgcacagatttacatggcatggctcatgtaacacaatagaaagattcctgaaaattgtatccaacttttctatccctattttaaatgcactgaagaatagactacttaaattaatctaaaggtaatttttcttgtataactgtggcttgaaaacatttagtttatatatcaactgtgtttaatcattccaagttgtttttattcagaataaatccctaaagcaagctttgctgagtgtcaaccctttgctctctcttacgactgattactatggttgcttctttgcttgtaactttaatttacggaaaacaggctcttggtgtccagaaggcagaatgggcttggtgaaacagatgctagacctaaatggcttttagcatttctgcctctgcctcctggttgcttttgttgtatttctatgggtgccttgaataatgtgagtcactcaggtgggcagagttcatagagattaatttctggcgtgtgaagaggaacagaaagcagtagaggggtagatgttcttaggatgatccacatctgttcttctcttgtccctgtgcttcctggtcacccacctccagtttcagttttattcccattttacgatgaacattaaacagtgtaattaagttatgcaggacccatattgtgttttaaataacacttccaaaagtatatcatgggtcagttcataattgtgaacaagattctcttgtttaacatagcaaagtgaagctgaatctcaaaatattgttccctcttaacccaatggtatgaacaatataaaattaaaaatcagcactgaccattcaccattcatccatccacccatccatccatctagtccaaggaggaaaaaactcccgatcgtcaatgagaagaaaatactactatctagcaaaggaagcagatctaagccccagagactgcatgtctggctttggtaataggcaatgtgcatctagttgctctctgcataaaccaaataggggagaaataaacaaaataaaatcctgaaaacaccctactctcatcccaactgtggagaagctaatgaggcaggctgagagaagaaacagggacatttccctaagggtggcagtcttcttgctcacaagagagtaatattttttccaccttgatgtctccatgatggcatgaaattaggggataaaaaacagaatgaccaaaaacagtcaaagctaattaacttttgcaataaacaaggttgtaattgatcagtaaacaaaagaggagaatgggacaaaggagttggaatgagtagggaagtgtatactagaatccctgggagttgacttcaacctgcctattgccttaatgccttatctctgttatatctgaggaagagagcagctaattgggttaaataaatctcctgaggtactcctgatggaagtagaggctcagaggccctgaggtgagtaagggaaactctctgaagccataggcactgaattgattcccaataaagtgaagcagaccttggcataaaataattacaaaaccagagaggagatggcaaaactccaaaacactaaccaagaccctgccaaagcccaaacactcccccttgacaaatgacccctggtataagcagaactcaaattgtagtttatacgggaagctaaatctcagctaaggtaagaagggaatcaaaaagaattgacccgtattctaatcatgcacatagaggttctagattaacctgcccaagtttatcatggttgacatggagactaataacaggcaaattaagaaaataaaatgtagggaatcaatgaagaactaaatctgtagaaacaaggacacattatgtttcaggggagaaaaatgtgggtataaatgagtaacactaaaacacacctttattaagccattaagtttcaagtattaatggcaaaaaccgcaattacttttgcaccaaattaatataaagatgaaatttttcaggatttggtgagaaaaataaacaagtcacttacaccacaagctcaaaagcagaaacagattatttaatgataaaacaggggattacatggggaaattgtggtaaagggtagaataatcattgatatcatttaagtatagatggaaattaaacgatcatgagattgaggattacaggaagtaaatattgtaaattttgacaacatacaaaattattattaaaaatgttgagagaatcttgataatggaagattgaattgctcaactctctttttagacattgaactagaaggctgtgtagaatagaatgactaaaaacagactttaaaacttacaaatcaccaaggggaaaacatgtatgtaacacataaagaggcaatccatgtagaagcttaaaaacaaaagaaacattacatttagaatgtaaaacataagaagttgattgcatttgttatatcaatgaatatgaatgtttagtacttgttaagataatgatatatatgtaatataaatgagaacaatactcatatattgagttactacatgaaaaaagaaatcccatctatatactatatacaagaaataattctaaagatgttactcattgaattaaaagtgaacaataaggtaaacagttaaatgctaacaaaaataaaactaaaattcataatactactttcagactattaaatccaagccaagaaaagggctaagtgagatgaaaaaactcagtgtatgataaaagttgcaattcacaatgtgactataattgtataaatctttatggtctaaataacatatctaaaatgaagtaaaataaaaagttttcagctgcaggaaatgcaaagagaatttaacaaaatatggtggtggtaagagatgttaattcatcatgtcagccattaaaagattacgtagaaaaaaaattagttgcaatttaaagggtctgaataaaatcgataaaaagttaaagcaaatgtagatgtagaaatagataacttgatagccagttggttggatggattgatgaaagaatgaattatggctatttctagagaatcactttattgcaataccttaggccatacacggaaatgaaacatatattagacctcaaagaaaacttttatatagcccaaaaaggtaaaataatatgaactacctcactggccaatatataataaaactagagcttaatagaaggacaacaaaatccaatcacttaaaaaaaactttcaaataattcttgagttacagaagaaatcaaaagaaaaattataaaagatgaagaaaacaacaaatatttgacaaaatgcaagaccattttgctattacaattgacctagaaaataatattcacggcaattttgaaaaagaaaagtaatgagggatgaactaactttatcagattttaaaatacatcaggaagttgcaataattaaaataaattggtactggagaagagcaaaataaaggggccacccatagatttgcatatttgtaacattaatttgtgataatagtattattttttaaataactgagaaaagagaaccttcagtaaataatgtggaatagctggctaattgttgcagaaaaggataaacctgtatccctatcttaatttctaccttaaaataaattccagatggaagaaagtattaaatatatttttaaaagcctgaaacaattgttcttcaaaagttttgctaaatgtacttagaatcttggcagagggaagtgctataaaaaggatttaagactcaaaatttataaagaaaagatcaataaacttcacaacattaaacatattagaaaacaaactttgaggagaaaacagtatgagaaaggacaaaagactaatgatagactggagaaaattatttgcataaatatcaacattaatttttcttaatttttaaatctcatagacaaaaacaaccaacctcctagaaaaatatgaacagttcatttgtaaacaaagaaaaatcactgggtatttaaacataaattgttggtaagtctcatacagaaatagaagaaaaacacataaatataaatcatagggaaaatctaatatttatacccacattgtttggcaaataattaaacctggaaatttccagagtggatatattgataaaggactctcaattctgaggatataaaatatggtgaactatcttgtgaagtttcagaatatttatcagaaattttggtcatactgtttgaccaaaaatgttttcactgagaggaatttaccctcagcaaatacttggagaagttcaccaacatgtttgtacaatgatgttcattccagctttatttatacaccctctccttctgacacacaattgaaaacaatggtaggattcgttaatatgagactgtttaaataacacaatatgatgaagaattatgaaaatcttttaaaattaactgtttttactgaaagggaaatagctgtagtatatacaattatattaatacttttaaataatcttttttttttttttttttttttgagacagagtctcgctgtcgcagaggctggagtgcagtggtgccatctcagctcactgcaagctctgcctcccgggtcacgccattctcctgcctcagcctcccgcgtagctgggaatacaggtgcccgccacctcacctggctaattttttgcatttttagtagagatggtgtttcaccgtgttagctaggatggtctcgatctcctgacctcgtgatcctcccgcctcgcctcccaaagtgctgagattacaggcgtgagccaccgtgcccggctcttttaaataatcttaaaggtcttccaaccttgcccgagccgggcagggtggctcacacctgtaatctcagcactttgggaggccgaggcgggcggatcacgaggtcaggagataaagctctcctcagcaaatgtaaaagaacagaaattataacaaactgtctctcagaccacagtgcaatcaaactagaactcaggattaagaaactcactcaaagccgctcaactacatggaaactgaacaacctgctcctgaatcactactgggtacataacgaaatgaaggcagaaataaagatgttctttgaaaccaatgagaacacagacacaacataccagaatctctgggacacattcaaagcagtgtgtagagggaaatttatagcactaaatgcccacaagagaaagcaggaaagatccaaaattaacaccctaacatcacaattaaaagaactagaaaagcaagagcaaacacattcaaaagctagcagaaggcaagaaataactaaaatcagagcagaactgaaggaaatagagacacaaaaaacccttcaaaaaattaatgaatccagttgctggttttttgaaaggatcaacaaaattgatagaccgctagcaagactaataaaaaaagagagaagaatcaaatagacacaataaaaaatgataaaggggatatcaccaccgatcccacagaaatacaaactaccatcagagaatactacaagcacctctacgcaaataaactagaaaatctagaagaaatggataaattcctcgacacatacaccctcccaagactaaagcaggaagaagttgaatctctgaatagaccaataacaggctctgaaattgtggcaataatcaataacttaccaaccaaaaagagtccaggaccagatggattcacagccgaattctaccagaggtacaaggaggagctggtaccattccttctgaaactattccaatcaatagaaaaagagggaatcctccctaactcattttatgaggccagcatcattctgataccaaagccgggcagagacacaaccaaaaaagagaattttagaccaatatccttgatgaacattgatgcaaaaatcctcaataaaatactggcaaagcgaatccagcagcacatgaaaaagcttatccaccatgatcaagtgggcttcatccctgggatgcaaggctggttcaatatacgcaaatcaataaatgtaatccagcatataaacagaaccaaagacaaaagccacgtgattatctcaatagatgcagaaaaggcctttgacaaaattcaacaacccttcatgctaaaaactctcaataaattaggtattgatgggacatatctcaaaataataagagctatctatgacaaacccacagccaatatcatactgaatgggcaaaaactggaagcattccctttgaaaactggcacaagacagggatgccctctctcaccactcctattcaacatagtgttggaagttctggccagggcaattaggcaggagaaggaaataaagggtattcaattaggaaaagaggaagtcaaattgtccctgtttgcagatgacatgattgtatatctagaaaaccccattgtctcagcccaaaatctccttaagctgataagcaacttcagcaaagtctcaggatacaaaatcaatgtaccaaaatcacaagcattcttatacaccaaaaacagacaaacagccaaatcatgagtgaactcccattcacaattgcttcaaagagaataacatacctaggaatccaacttacaagggatgtgaaggacctcttcaaggagaactaccaaccactgctcaatgaaataaaagaggatacaaacaaatggaagaacattccatgctcatggataggaagaatcaatatcgtgaaaatggccatactgcccaaggtaatttatagattcaatgccatccccatcaagctaccaatgactttcttcacagaattggaaaaaactactttaaagttcatatggaaccaaaaaagagcccgcattgccaagtcaatcctaagccaaaagaacaaagctggaggcatcatgctacctgacttcaaactatactacaaggctacagtaaccaaaacagcatggtactggtaccaaaacagacatatagatcagtggaacagaacagagccctcagaaataatgccgcatatctacaactatctgatctttgacaaacctgagaaaaacgagcaatggggaaaggattccctttttaataaatggtgctgggaaaactggctagccatatgtagaaagctgaaactggatcccttctttacaccttttacaaaaattaattcaagatggattaaagacttaaatgttagacctaaaaccataaaaaccctggaagaaaacctaggcattaccattcaggacataggcatgggcaaggacttcatgtctaaaacaccaaaagcaatggcaacaaaagccaaaattgacaaatgggatctaattaaactaaagagcttctgcacagcaaaagaaactaccgtcagaatgaacaggcaacctacagaatgggagaaaattttcgcaacctactcatctttcaaagggctaatatccagaatctacaatgaactcaaacaaatttacaagaaaaaaacaaccccatcaaaaagtgggcaaagaatatgaacagacaattctcaaaagaagacatttatgcagccaaaagacacatgaaaaaatgctcatcatcactggccatcagagaaatacaaatcaaaaccacaatgagataccatctcacaccagttagaatggcaatcattaaaaagtcaggaaacaacaggtgctggagaggatgtggagaaataggaacacttttacactgttggtgggactgtaaactagttcaaccattgtggaagtcagtgtggcgattcctcagggatctagaactagaaataccatttgacccagccatcccattactgggtatatacccaaaggactgtaaatcatgctgctataaagacacatgcacacgtatgtttattgcggcactattcacgatagcaaagacttggaaccaacccagatgtccaacaatgatagactgcattaagaaaatgtggcacatatacaccatggaatactatgcagccataaaaaatgatgagttcatgtcttttgtagggacatggatgaaattggaaatcatcattctcagtaaactatcgcaaggacaaaaaaccaaacaccgcatgttctcactcataggtgggaattgaacaatgagaacacatggacacaggaaagggaacatcacactctggggactgttgtggggtggggggaggggggagggatagcattaggagatatacctaatgctacatgatgagttaatgggtgcagcacaccagcatgtcacatgtatacatatgtaactaacctgcactttgtgcacatgtaccctaaaacttaaagtataataataataaaaaaaaataataatcttaaaggtaaggtacagaagtgttaagtttttaaaaatatgcacatttagatagatttattgctacattaatcaatctttttctccccctttccagaaggaaacagaagtaaaattaaatagtgcctgcctttggaaaaagatggggttagttgagtgagagagaattctactcttcattttgctcctttctgtagtgttccagttatctaatccttccacatatcagctgaagttttctaagcagtagttatttttagtttacttccatatatttttaaataccaaactaatcaatattgactgacaatatcaatcagttagtaaaataattgagtaacccctgtttttatatattctgatatgagatgaaaatttaggaactctatcaattttaatacttctgtagagagtttttgcatatgtatattcactattaatacacagaagattcctaagttcaggctgattcctttaaagtgtctgttttacccccacaagaattgaaatagtttcagtatattttgttttataaatatttaacttctgtttgctgaggttgagaaaggcaatattccacaagggtccattttctaaatctaaggcatgaatgattttttcatagttacagtatttatgaaatattgagaatttatgcatgtgaaatgtctcataatggactattttagatttaagctattctttttttaggtctccagtgtaaaattcaaagagtagaagctatagcaaatgaatatgctgcgtttcttgtgctataggctccttaatctttacagaagtcttatttgctcagctagattggtctaaaagaaatggtttaattttctctcaaataattcaaccttcaaaaagaaaccttccatgttgttatttttgcacttgtagtgcatactgggggtgctctgccagcttggcattgaatgtgtttgttttatgtagagtgtggtattaaagtagtggctgaattacttgacataatttgcataaagtcatatctcagtgataaaaattaatgtgttgagggctgtgagtgagttggaatgagtcatttatttcttaatagaaaaaagctttatcttcagtttctatcacacttgaacttcaattacctggaatattttcatttgtttgtttattcgcatttacttaagtgttaatgattattcagtggtttcagcaggagagtgttttaggtctgtctttaacctgagtctaatcatagaaggagttggcacgtatcagaattgtaccgtaaaagcacccctaaagcttgacaatgttctagtgattccattagcagctattaaatggaggtttaatgtctttgccatttggggatctgacagactgaaacttagtattcgttttggcccctgtgaatatcatctgctcatccatgcttataaaaatgaaataaaaagtcagtctttgttcttgctcttgcagaagcaattgtagatttttatgaggaaaacaatgaacatgtcaccctggatttggcagcagggaagagcagggagtatataaattgtctttttgggtgccaactgttttgcaccagcattgtttatattagtgaaatggttgtaagtcgtgtaaattgtatttttttccttagctatgttttatggtgggggggtgtcgtaggggaatgtgcattaaatctgaaatggtctcatgcttaaataccgcagtgtggtagacagttaatcttcagaacaaatagtgaacatgcgtaactgctttattgccgtcaacatatgtcactctgtaattatcctggcttataccttgggatgggctaaggatgcaggagctgtctcagctcagagaattttgttttcattttttgggttccaaacagaatgtattgggagaaaaaaaaatcatgtggatttgcccaatattggtgctcgtaaaaacaattaccctgaaattattagtgctgtatgttcaggacctaggagagcaggtgttgggtaagtctgactaaacagatgtgtcaatacaccttggctcatctgagactgtttgggaaaattcttgaggaggctcacgacaccacacatagtcatttccagttacctggtggtgacatgcacaagtggcatatagagactgggttgcagctgaccttctggtgaccagggaatacctccagagagactgcgatgcagttcgcaactgaaaaaagagccacttgaatactgatccttgatgatgggtatcgccattgaggcagcaagcccaactgtttatcttttttcttatttggtaactaggtgggatggttgtatagaaaaatgtgggtgggaatgaccacagaccgcaaactcacgtttgcaagaaatgtagctgtaattttctgtagattttacccatgtcgtcctctatacatagagagatcatacatccaggtttgcccagaagagtccagggttatgacttgtcctgaccctcctttttccctcccaagagtttcccagtcatgccagcataagaacttttccctgagttcgttatgatggaagaaccttgctgcttcaacggagagagccatggggatttaaaatacacagagaaaggcctatcagtacattataatatcatttccttcaaagtattcaaaatttccttagtctgtctctagttctccaaagggtgtatgtaatattataatatgtataaccgagatgaaaattgttggccagtggagcagcaagcatatttcttggataatgtagtgctttatttgggaggacttgatatcctttggggaggctcattgattttatgagatcattagtttacttattattcaataaatttaactcctctacactcaaacctgtagtaaaatatgttttgtgactgtgatgttctcttttcagaagtgaggctgggctggcaatagctggctggaacatggtctgggaaggaaatgggtgaggtcaaaagtggtgagacaagttgctgaagaacaggaatctgctatgcgaaagaatcagagtgctcccttagggaccttaatttaggggtcttgaaatatatcacactctcccaaaactaattcatgcttcaactgccctcattaatcataagtcagttgtgaaagaccataatgacagtaactgcctacgtggatcacattttgtaaaccaggttttagtcgcagtatgcaccatactgaccaaatttgtgtccatgtaaatcactgttcacatccatccagattccatttacatgcattcaggcactagcatacatacatatagatatacatgtgtttgcataaggagtgcatatagttatatatctgcatatagaatttacatgcatacaggcactagcatacatacatatagatatacatgtgtttgcataaggagtgcatgtggttatatatctgcatatagaatttacatgcatacaggcactagcatacatccatatagatatacatgtgtttgcataaggagtgcatatagttatatatctgcatgtagaatttacatgcattcaggcactagcatacatacatatagatatacacgtgtttgcataaggagtgcatatagttatatatctgcatatagaatttacatgcattcaggtactcgcatacatacatatagatatacacgtgtttgcataaggagtgcatatagctacgtatctgcatgtagagaagtatctttgaaatcaagtgatctggctccataactgtccttccatgcacacagcttgcctcctctcctgcccttaaattggggctgggaagggactacctgcctctctctgattccaagtgacctcagaaagtacacctgctcttcacattcacatgtttaattcgtacctttctaatgcctggaggtgatttggatatctggatgattttttccctttttctttcctacttcttcagaataaaccacttcttaatattctttgccacttttgtttcaatgctgccagaaggattttcttaaatcacaggcctaatacttttatttcagtttcccagaaacttttgctagatccttactgtgtgaaaaatgaatgcctcatagcatggcattcaagggccactctgatctgacctgcagtttcttgcctcccttttgcatcatctctgccaggaaacccagatcgagcttgtgcttcccaagtcttgatgcttctccatggtcttcttgtgttctccgcttctttaaggttcacctgaaatgcagcgttctaccaagcattggccagttctcataatcagtttttcttttctgtgagcatagtggatttttatcatttgagcataaccctatcaatgtcttgaattatgactgtgtgcatacctgtagtacctgttaattataaactcctagaaggcagaagacatgtctttttattctttgtgtctctcctagcatctaacgcaatacctggtaactactaagactcaataaatacatgcaaagtgaagacaaaaattaattccaagctaaaaaatgttgctaaaactttgaaaagactccttgttgaggatcaaaggtttttgataatggcaaatgcctagataaccagtatttctcaaagtaaagccccaaaattaccaaccaatcgttctgtccacaggttacctatcatttaaaagaaaaatatttgttcatatatatacattcaaaatttttggaagtttgaaatgtaagtttagttatggttttcataggcatttttttgttattttccatttttactacttttatttttttattattatactttaagttctagggtacatgtgcacaacgtgcagatttgttacatatgtatacatgtgccatgttggtgtgctgcacccattaactcgtcatttacattaggtgtatctcctaatgctatccctcctccctccccccaccccatgacaggccccggtgtgtgatgttccccaccctgtgcccgagtgttctcattgttcagttcccacctatgagtgagaacacgtggtgtttggtattctgtccttgtgatagtttgctgagaatgatggtttccagcttcatccatgtccctacaaacgacatgaactcatcattttttatggctgcatagtattccatggtatatatgtgccacattttcttaatccagtctatcattgatggccatttgggttggttccaagtctttgctattgtgaatactgctgcaataaacatatgtgtgcatgtgtctttatagcagcatgatttataatcctttgggtatatacccagtaatgggatggctgggtcaaatggtatttctagttctagatccctgtgaggaatctacactgtcttccacaatggttgaactggtttacagtcccaccaacagtgtaaaagtgttcccacttctccacatcctctccagcacctgttgtttcctgactttttaatgattgccattctaactggtgtgagatggtatctcattttggttttgatttatatttctctgatggccagtgatgatgagcatttttttcatgtgtgttggctgcataaatgtcttcttttgagaagtgtctgttcatatcctttgcccaagttttgatggggttgtttgatttttttcttgtaaatttgcttaagttctttgtagattctggatattagccctttgtcagatgagtagattgtaaaaatttgttcccattctgtaggttgcctgttcactctgatggtagtttcttttgctgtgcagaagctctttagtttaattagatcccatttgtctattttggcttttgttgccattgcttttggtgttttagacatgaagtccttgcccatgccttcataggcatttttttttaatcttgttaagtactattatgctctccaaggctatgaaaacattgcaaagtgttggccatgctgtctcagcaaatattcagttaatggtgcacttcccccaaaatatatgatttcctgtagttttttctaattatttatatctgttaatttttttcttttttattgttagtattttgatgaatcatattctcgattcacaataagcagatcaccagcacaaaaacattcactagagaaggggtgttcaatcttttggcttccctgggccacgtagaaagaactctcttgagccacacataaaataccctaacactaacgatcgctgatgagctaaaaaaaaaaaaatcgcaaaaaaaaaaaaacctcataatattttaagaaagtttacaaatttgtgttgtgctgcattaaaagccatcctgggcctcatgtgggtcgtgggccgcgggttggacggtgccaaagcatgaatgttgtgattacagtagtaatataaatactacaattcatgtatatatttttaattttaatatagagacatcatgttgtccaggctggtctcaaacttctgggctcaagcaatcctcctccctcgacctcccaaactgttagaattaaatgaaccactgcacctggcctacaattcaaattaatgtaaaaactgcaagtggttggtgatcaaaactccaatgcacatgtagactataatttgttcatgtcaggatagtgtgatgggtttactcaagcagccacaaaagaaaagtttgaatcagaaataagatgtgaatgatttttatattttattttatattttttaccccttatccaattataatacatttgtcacatagtgactttgaaactttgaaacgttcttccagttttcaaacaaaacacaatgacctttttgttgaactgattaagtttctctggaaagtaagataatactttccccatcaacattaatgtattttgttgcaaaaggtggggaaatcaccaaagtcataagagcataattcaactttgcactctttgttaaaaataatcaggtaaatgtcacactatgactgagatggtggtaaaataagccaaaagtttaatgacaaatgttatgtccagcggggaaacatgatgaacttttggcaacatttctgaaccaaatggacacccctggaatctgccagcactggaaaagcggttgctgtcctggaagagtggttctatattctgttctatagtacttactatgcttactatagtactatatactatacttactatatactatataccatacttactatagtacttactatagagcacagtacagaagaacgggctgtataaatcagcatttggcacttgtgtggtacatatatgagggagtggtgcctggcaactgtttgccttacttgttattggaaatccaaactctagcaatgaaagttatttttaactcagtaaatggttatcttggagtctgtgatgtagcctagaaaacataccccggggtgaaggctgatggagcacagccatatgtgcaacaaggaaattctcacactgctgtattcacagatgacatttggtggtcaacgctatgcttcctcatactgatttggtggtgaaagaaatactcaaaaaattatagccatagatgtaagtctttgggatttattttctgggtttcaaggataaatttctgcttttccaaattgaagttcatcagggagtagagaaaaaatgaattactctatttttttttgaaaaaggcatgtttttcatacgacaccaataatacaaataaaggccacttttatttgtatcagttattcaagtgacaccctcagcaatgtatttgatgtctgaataatctgaacccttcttttctgggcagaaacattttattccaaagacatctaaatatttgaaagaaataccaaacatttgccactgttcttaatgacaattaattttaaatagggcttctctagtacagtacaaataaagactaagaaaagaaacaagttgggatgtgaaactggaagcctctgggagtaaccattaccacgacatttaaattgtgactgaaaatgtgcaaataacaggttctctttaactgataagaaatgatttttaatttaaaaaaattttatataaatttgtttttaatgtttaaaaattttacctaaaagatgatgtttgcatttctgcctaatgttcattaagtgggttttaagtagtgaaaaattgaagaaacaccaccattgatatgaaagtggtgactagttttgaaaaatttcaaaaaaattgtttataataaatgctttcaggcataaacatattaatagtataaatatgtacaaatatgtactcactagcaacaatgtaattaagtacagataatataatttatgatttaaaacatttaaaatttatttgttacatttattcccaatctttgagctttcaatctcatacagctttgatacattctgcaacttgcaaaaataattttcggttgtttcataaattgataatgtcttctatataagtattttctgctctttgtttaatctttctcttgaggcatctattttgatttttcctattttctcatgaagaatgaaatgctttagtgatacggaatataggatttctagaaatcttggtaattactgaaatctttgcatcatacggagtatctgtgttgagtgttctgatccttatttatttacttttggtaactatcattgtagtagtgaaaatggaaatcagggccttgttttcttgtcttaattcttggcttctcagttttacagacagtaaagagatcaaataaagtaacatactatttgtccaatgtaaagctaattttatcatattttgcttctagaaattcagaattcacccaaagtagcacaattagagcagggcgtagtagagcaagatctcctcaactttcctcatatttcgttgactgagacatgttgtgatcaaagaatagatttcatcaaagaagtctttttgttttttacattttccatctcttttcctgactcctttatatgacgaacttcatctgtacacctgacttttcattcctatattttagaaaagtaatagcttctgggagagaagagaggaaaggaaaatgatcttttgttttggaaccatgaaagaccaagatgaggcattctgagatgccaatttcatgaatttgtctttgagaagacaagcaaaaagtgatagtaagctgttctttagcatagaaatttgtttctggttttgtcatcatgattaatcattctgatttgcagccttacttgtttcaatcattgaggccccattttaatgtgattaacatttttgttccatttatggagcagtactggcccctaatttttgagaacaggataacccttgattggccttatgtaaataaatcgtaacttaatgcccttgaaattggagtatcccccaggagaacaagctgtaaatcagagtagaaaaaagtgagccttaccctgggggcgggagctccacatggcatattcaagatgaaccaaatgcctttatttcagaattttaattcatggtactttttccttttcaaatggtgctgtcatcttgaaatgacagagattgagtgctaaattgctattgcataattttccttatctctcatctatagactggatttgattgaaagttcagattttgtgaagaatgttttacataggaaattttgaaatatggggaaacattatttttacataaaggaaaggagaactctgtgtgtgtaaaacggagttagcattttttttttttttttacccagccagggtctttgtgtaattataagcaaatagctattatcattccaacagattttttttcctctttgattctttctagcaatctctctctctatgtagcttcttatccctttttgtgccttaaaattattatgctattttttaatagtaaagaggctgaaacaatgtcctggaatccatatccagtggtgacaggagactaatcattgcctctgtctgagttatttgaaaatgggtccacactttcatgtgcgtccgtgtgaacagaccaccaaacaggctttgtgtgagcaacaagactgtttatttcacctgggtgcaggcgggctgagtctgaaaagagagtcagtgaagggagctaggggtggggccattttataggatttgggtaggtaaaggaaaaaggggggttgttctctggcaggcaggagtaggggtcacaaggtgctcagtaggggagcttttgagccaggatgagccaggataaggaatttcacaagataatgtcatcagttaaggcaggaaccggccatctctatgtgtatgtgcaggtcacaggggatatgatggcttagcttgggctcagaggcctgacattcctgtcttcttatattaataagaaaaataaaatgaaatagtggtaaagtgttgggatggtgaaaatttttggggggtggtatggagagagaatgggcgatgtttctcagggctgcttcgagcgggattaggggcggtgtgggagcctagagtgggagagattaagctgaaggaagattttgtggtaagggatgacattgtggggggttgttagaagaaacatttgtcatgtagaattattggtgatggcctggataccgttttgtatgaattgaaaaactaaacggaataagagaaggagaaaaacaggtattaaaggactaagaattgggaggacctaggacatctaattagagagtgcttaaggaggttcagcatagccttgccagcaaagattatttatttactttaagagttaggagtggcggtttggggatagcatcaggaggtatcagctgtgatggcttggaaaaacagtgtaaactggcactgtaaacaagagcagggcatgtatgagtagttgagaatggtgaataggagtatgactagacagaaaacagcacagatgacaagttttttggggcgcagtccaagttggtctggtgtctgggatgagactggggcctgataaaaaggagtgtctatacaggagctcaaatgggccgtaccctgtagcattctgaggacaggcctgacttctgagaagggaaagtggtaaaagtattgtccagtcctttttaagttggtggctgagcttggtgaggtgtgtttttaaaagacttttagtctgttctactttccctgaagactgaggaccgtaagggatgtaaaggtttcactgaatactaagagcctgaaaaactgcgtggctgttttgactaataaaggctggtctgttatcagactgtatagaggtgggaaggctaaactgaggaattacgtctgacagaagggaagaagtgattgcagtggccttctcagaccctgtaggaaaggcctctacctatctagtgaaagtgtctacctagactaagaggtattttagttatttgacttggggcatgttgagtaaagctaatttgccagtcctgggtggaggcaaatccttgagcttggtgtgtagggaagggagggggcctgaataatccctgaggagtagtagaatagcagatggaacactgagaagttatttccttgaggatagatttccacgatgcaaaggaaatgagaggttctaagaggtgggctagtggcttgtactatagcatagcctgcctttgctggtgtgtggcgattaggcctggtggagctgccatcagtaaaccaagtgtgatcagggtgaggaacaggaaagaaggaaatgtggggaaatggagtaaatgtcaggtggatcagagagatgcagtcataggggtcaggtgtggtatctggaataatgtgggaggtcggattgaagtccgggccaggaacaatggtaattatgggagactcaacaaagagtgagtacagctgaaggagccagggagcagaaagtatatgcgtcaggtgtgaggaagaaaatagattttggaagttatgagagctgtagagagtgagttgagcgtagtttgtgattttaagggcctctaaaagtattagggcggcagcagctgctgcacggagacatgatggccagcctaaaacagtaaggtcaagttgtttggacaaagaagctacaggacgcaatcccggtccttgtgtaagaattctgactgcacagccctgcacttcggctgtgtgtaatgaaaagggttgggatgagtcaggaagagctagggtggggacagtctctaaagctgtcttcaaggaatggaaagatgagtggggaaaggatttaggatctatggggtcagctaggtttccttttgtgagtttatgtaatggttttgttaggatggcaaaaccaggtatccaaaggcaaaagtatccaaccatgcccaggaaggaaaggagttgttgttttgtagaaggtgctgtagtttgagagatcagttggacactatcggcagggagagcacatgtgtttttatgagaattatgccaagataggtaacagatgaggaagaaatttgggcttgactgaagtgatggaggctatctgtgagggcttgcagcagtacagcccaggtaatttgctgagcctgatgggtgtcagggtcagtacaagtgaaagcgaagagaggctgggacgaggggtgtaggggaatagtgaaaaaagcatttttaagatcaagaacagaatagtgagttgtggaggaaggtattgaggacaaaagagtgtacaggttgggcaccacagggtggataggcaaagcaatttggttgataaggcacagatcctgaactaatctgtaagacttgtccggtttttggacaggtaaaatgggggaattgtaaggagaatttataggttttagaagcccatgctgtagcaggcgagtgataacaggctttaatccttttaaagcatgctgtgggatggggtattggcattgagcgaggtaagggtgattaggttttaatgggatggtaagggatgcatgatcagttgccaaggagggagtagaggtatcctatacttgtgggttaaggtggggggatacaagaggaggatgcaaaggaggctttggattgggaagaagggcggcaatgagatgtggctgtagtccaggaatagtcagggaagcagaatgtttagttaaagtgtctcggcctaataagggaactgagcaggtggggataactaaaaaggagtgcttaaaagagtgttgtctaagttggcaccagagttggggagttttaagaggtttagaagcctggctgtcaatacccacaacagttatggaggcaagggaaacaggcccttgaaaagaaggtaatgtggcgtgggtagcctccatattgattaagaaggggacggacttaccctccactgtgagagttacctaaagctcggcgtccacgatggtctacagggcttccgaggcgatcaggcagtgtcagtcttcagctgctaagccgagaagatctgggaaggagtcagtcagagagccttgggccagagttccagggggctctgggagtggctgccaggtgagttggacagtccaattttcagtggggtcccacagagatgggacgcggcttacgaggaatcccaggctgcaggcattccttggcccgatggccagatttccagcacttgtagcaagctcctgggggaggaggttctggaggaatgcctggctgctgcggttcaggcgtttggaagttcttgtgtgctggagatgtggctggggtttgtctcacagtggaggcaaggaattgcaactcagaaatatattgctacttggctgtctctactctattattgtacaccttgaaggtgaggttaattaagtctggttgtggggtttgagggccggaatttaatttttggagttttatttaatgtcgggagcagattgggtaataaaatgtatattaagaataagacggccttttcaccttttagggtctagggctgtaaagcatctcagagttgctgccaaatgagccatgaactgggctggatttttatatttgatgaaaaagagcctaaacactctctgatttgggataaaggaaaaggagcattaaccttgactatgtctttagctctagccacctttttaagagtaaattgctgggcaggttggggagggctagtcatggaacgaaactgtaagctggaccgggtgtgaggagggaaggtgataaaagtattatagggtggaggagtggaggctaaggaagaattgggacctagctctgcctggcgaggaggggaggggtcagatgggtctgtagaagaggaagattagaaagactcagcgacgcttggggttgggactgaggggacaggtgggagggaaagaaggaagatttgggatgagttgcattgggaacagagactagggagggaccgatgtgtaaaagaatgcctggacgtcaggcatctcagaccatttgtccattttacgacaagaattatttagatcttgtaggatggaaaaattgaaagtgccgttttccggctatttggaaccactgtcaagtttgtattggggtcaagcggcattgcaggagaaaataagatgcttagattttagatcaggtgagagttgaagaggttttaagttcttaagaacgcaggctaagggagaaggaggaatggaaggtgaaagcttgcccatagtgaaggaggcaagcccagagaaaagagagtagagacacggagaagaggtgggggttcttgccctccagaaaagcagagaaggggtttggggcatggaaataaggggttggggcacagagataagaggttgggggcgtggaaataagggattggggcacagagataagaggttagggcatggaaataagggatcggggcacagagataagaggtcagggttcctgcccctcccctagaaaagtgggacttgccactaagggtgaaggtgaaggggttgaggggttcttgcctctcccccagaaaagcggagaaggggtagagacacagagaaggggttggggttcttgcccctcccccagaaaagtgggacttgccgctaagggtgaaggaccaaagcaggcgtccctgcgtggactgacacctctgaaacctgggtgaataatcagagaggcatccctgcaatgattaaacaccaagggaaggctgccttccctagtccatgactggcactggagttttgggtccacggataaaacgtgtctcctttgtctctaccagaaaatgaaaggaattgaaattaagagaagggagagattgaagtgtggtgccaagattgaaaggagaaagaggttgagggatagtgagagaggttggagaagagagtaaaaagaggccgcttaccggatttgaaattggtaagatgtttcttgggctggtcagtctgaggacctgaggtcgtaggtggatctttctcatggagcaaagagcaggaggacaggggattgatctcccaagggaggtcccccagttcgagtcacggcaccaaatttcatgtgtgtccatgtgaagagaccaccaaacaggctttgtgtgagcaacgaggctatttatttcacctgggtgcaggcgggctgagtctgaaaagagagtcagtgaagggagctaggggtggggctattttataggatttgggtaggtaaatgaaaaaggggggttgttctctggcaggcaggagtaggggtcacaaggtgctcagtaggggagcttttgagccaggatgagccaggataaggaatttcacaagataatgtcatcagctaaggcaggaactggccatctggatgtgtatgtgcaggtcacaggggatatgatggcttagcttgggctcagaggcctgacacacactatagcagttcccatgaaaattagtgtaacttcctagataaataaggtatgaactcacaaggaattgtcatagaacaataagatgattccacatgacaacatggacctgtctcataagcataatgttgaatgaatgaagccagatatggaatacatactgaatgattccaattatgtgaagccttaaaacaaagaaaaataatctatgtagtcagaaatcagaattttagggtagtgtctctattgggtgagtagggcctggaaagcatatggagggcttctggggcattggtcacatcttgtttctttatctgtgtgctggttgcaagaatgtgttcagtttgtggaaacccatggagctgtatacttaagtgtatttttccagaaggattttttatactttgacagaatgttcaaaggatgtcctcttactgtgaacaacacaaatgattggagttataatgacacccttgctgtttgagggtgcatttttcaaaggattttagtcacagattcccatgttcactgaagctcaatagactatcccctacctgatgacaagtaatttgcttctttctttagtcctgcttttacctctggccatgaagaatcctgctttccactggtgagttcagaaatttctagcagcgatatttcttcagcccaaagtaaatatcctaggacatggaagaagcagtatagcccctgccacactctgactcatcttatccctgcaactcagttttctcattcctcaccgtcacttgcaggtatgaactggcaggaacctttccacagattttccagtgtctaatacaccatctaagaggtaaatagcctgactggagagaagctgacagtgggcagaaaggtctggcttatccaactggatgaaagctctctacctactttgggcagatgagtcacatgacattagcactttaaagacagagttagctatgccacttgtcttggttagctcgggctactataacaaagtaccataaactgggtgacttataaacaacaggcatttattcctcacagttctggagtctgttagtttgagatcaaggtgccagcaagctcaagttctagtgaccccctcttccactttacagatcccgtcttgttgcatcctcacaaggtgagaagagagtgagagagttctctagggctctctgttactggagcactaagcccattcataagggctccaccctcagggctcgatcacttcccaaaggctccacctcctaatatcacattggggcttaggattgcagcacatgaattttgggggaacacaaacattcagtccattgcatcactctcaaaagtaaagaggcttcttatataggaaagcattttcagtctttagaaatcataaagtaaatggttcacttgagtgaggcaagatgatcagtggggaaaagagtgagatctgtagccagactccctaggttcttattatggctgaaatctaggctgaatgggttaaaagtttatgtccttgtgtttcttcaatttaaaaaaaatgaaataagaaaaataatagcaacagataataaggatatagaagaactcaccttgtttaggttactgggggttatattaagaactcaaaatggtaactgttgctagtatatagtgtagagtcctctattcatggtagataatcaatagatgttgcctaatgagtataatttgtcagatgattctgatcttgtgggcacccctctttccctacagaaaactcttcaaactcacatagactttaggctgcaatcctgtctgccatgcagtttgctctcatctggcccttgcctcccttccagcctcatttctcactgctctctcttgccctttatactctagtgggacccacaggcttggagcatccctaacaatctgtctgattctccatgactttccttagcctgccccctccacctgaactgcccaccctgctactctttacttgagaaacttctctcttcctttcctttcttcagattcatcttcttcaggaacttactgactcttcctagtgatgtcaggctgagtgaggtgagccccttttgagattccattgtgctggagcataatctctgagcctatcatgtatctctctttcttcattagaacaggagctccctgagtgtaggaacagtggttttatcaccatgggatccctaatacttaaaagagttcttgttattaatctatcgaatgaataactgaaccaacaaataaatgacaaaaaagagacataggtggtgatcttccttagaactataatctctgtatttatatctagcattttcatttagaacatgaggaatagaaaaaaaaaaacataaaatgacccaatggcttttagtgtgtctcagttttaattttgcaaatctggtgctttgcttctatgagttaccagcaatgctagtcaactctgagtcagacatcctggtgtgtgggttttaaataatgcatttcctttacccttaggtggtaaggtgtgacatttgctgctttgataaaatctccagatgatggtacttacacaggtgcaataaggtccaagttgttaaccttatctcacttgcaaatctgcaatttcctttttcctcaccttctttttgagatgtgactaaagaagtgatggcaaggatgtgaaggattaggcaagagacatcctgggttgggagactgcattctatagtaaaaatcctttgtcctttatttcccaggttgaccatcagggtaatactactagctcattgctcagcttttcactttgctttgattggaagtcatcagtgacttagaaaaaaaagctttaaaaatgcaaaattattacttttcatcttagtaatagaagcagtagctttcttaatggtaatccactttttttccccctttggttttctttttagcaaagattggtcactgttgacttatctctcatttacttataataggtatcatgtatccccttgactcaccccaatttaagacactctctgataaaacctgtagtgctttgcaccttcaagttaattacccaagtatccctttctaccagatctcctaccctaagctcatcctatacagtatttctggaacaaccaccctaggcctgggtgattcatttcagctttcttcctccctttccaggagaggggaatagagtgcctgggggagagaatgggaagtcaagggtcttcagaggaaataagtggtttcctgatctgcttcttttccttctcattccttcctcttagcagaccctcagaaaacctggatttgactcaatagaaatacctgtattagccaagccatttatacaaatgatttttccccatgcttttctctggaccctggcagcaaaattaaactttaaaagtaaaaagttttaaatttcatcattaaatctgtatcacattaactttttcctgttgtgagcttttatgtgatttcagcgctaagctggtcaaatatgttacaatttcctagtccattactgttatctttcaccactatttagtcacattttgaaaaagttgacttagtcagatctggcttctctaataaaatgccacagactgggtggcttaaacaatggacatttatttttcagggttctggaggctgggaagtccaagactaagatgccaacagtctcagcggcttgtgaggaacggctctctggaattggagacagcctccttctctttgtgcactcacaatgccttttctctgatgcatgctctcagagagaagggcactaatcctatcatgagggtcatgctttcatgacctcatctaaatctaattaaccacccccccccacctcccccccccccggccacccaggcttcacctctaaataccatcacatcaggggctggagctttgacatatgaatttagggaagacacaggcattcagccataaaaatggttatgtgaacctgttgtgtttctgctgttaacattgcatggtcctttcatttagtaagtgtgttttgattagttgcttcttttgcaggtgtgtgttttgattatttgttctctttctataagctcaacagctagtgttgactaatagcatttaagttagtgtcctgaatagtttccaactgacccctaatccacacttcatcccttgacacactgacctctatgaattgtatcacctgggctaccccagccaatggtgggcactggcaggaaatctgagtacaggacaagagagaggtcaaggtgtttattattgtacctgcagatgctggttagtggtggctgtatccctcttcagaagtagccctctttcccagccatatttctcactgggctctaatcaccactttctcccattgccctgtcaggcccacaggtggccaaggctccccattgctgtgaacctcagggtgctttatcattttacaactttgaaaatagccccttcattaaattctcttcagttaccccttggagtgtggcaactctccctgtgcccccaccacccctcccattagcaacacataatgtgtagttcccattatgaaataaatggaggtgttttatcactttattttgaatcacgccaagctcccttggcagtgacacataataggggatattctccacctttgtggaaatggcttcaaatggatatgtttttgaaacgtggctttcaacttgcaggtttcttttctaaaactcttcaaataggcatctcttcctctttgttaaaagtaattcaaatgataagacagtaattatgattgtaataataccaatagcagtagtaataataatagcaatcagcattcgcagtttagaaaatgtttttgcatatgtgtttcccatcttatccccacaaaatcctccagtgatagttaacatttttttcctgattttacaggtgagaaaattgaataccacagagaaactctgttcttttcacacacctcaaaatttagtaaaaggcaggctaaattcaaatagggtctttcaagtacaaatcttttaactctaccacagcagaagtgtgtagtgaaaatagagagattaggaggtcaatgacattatcttcaatttgtgtttgtgctgagttcatttcaatagatgtccttggccctttgtcacctgtttgcaaagcaaatgaaaatctcatactcagttccggcaatattagtcattttcttgaaggatagctactggtttgtctgttttcctgagtccataattcagaaatcctatgaaaagatcattaacttgttgagtagactgcaaaatagacactaatggaatataaagtaattcaagagctttgacgtctcagttacaggatgacaaggagttatgtattgaatacacatttatcaccaggaaatctgaagatgttgaccatggttctgttcttttcctttaatctccatttcttgccaatccaatgtatttttctccctcaaatgcataggccagtatctgcaatacattgtgtttctacccacaaagttaaagaggaaatttcttcttcctttttaatatatgtatatagagagattgaatgcaatattcaaactgtacttgtaacataattttattacgtttcaaaccctattaatcatagaatacaaaaaaattcttttctagaatctcatttttctcttatttttcataaaacaaaaagggtaaagccactgggggaaaaatgtgtcttttgttgtataacgaaagtatgacctttaggaaaactcttctcccctattttcttctgatttaggttcattctctgcctttttttccctctctttgtgtgtagtcagttttgtcaaacatatgactctctggaaattttgcagaaataagagttcaatcaagactcttggaattttctatcttggtttttcaaaaatatgcaactctatatgttgatgtagaactagagtgattgaaatatactctttgacagagggtaaagttaagggtaatccactttttttggaagataagaataaaaatatggtttgctttattttgaggaagaccaaatggaaggagcagacaatcatttatttcacaaactctaattatgtaaggagattgattgattggtttttggttgatatgggagaatgattttttttcctgccatgcacagcactgggcagtctagttcccttatcctaagggagtttataatctagtagaggtggtataacacacatacacatgggcacacacacacacgcatgggcacacacacacaataaaaatatgcactattagcctagtaaagtacaagcaaggcactgttggagagcaggagaggaagatgctaaattctcagcgcagtgggagaggttggatcttggggcgtttgagttgactttcccaggaaaatactgaggaaggagaggtatttcaggaaaataaaataaatgagaactgcttagagtgttctcagagactaagcccaatggcttaataggaacaaaatgttcatgacaggtgcaggtaagagttatgttagaaatgtaaatggagacagggcatggaaagtcactgatacccttgtaaagttcaaactgtatttcagagacaattggaaccccttaatatttggccagggtgtgttgaaggtggttgaaaaagatgggacggtgacgataaggaggctcttacaattatccaggagagcattaagaagagaaacccccaagcttgggcactggcagtggaatggagaaagaggatgaatgtaagagagattctggaacaagaaatggtgaactatcatagcgatttgatatgagggcaaaggagctgtagacaacaattccaaagtttcaactaaaaacattgtagaaaccactctattgcaatttcggcaacttttcaagtttgatttatttggagagtatagtagagaacacacattttctgaagaagtactagtcatatttgtcctttgaccctactttttataagacctcctttagtgtcacacctatgaatcatttatttattcaaaaaattaatgacctcctattctatggcaggcataaacaggagaaaaatagacacgatcccatttaccttcacccttccacccatatcctctccccactatctgcccccagtgcttttcagtttggataaggagaaaatatcagtagaaaaactgacttaacccattatatcccttgatctaatagtattttttaaatatgtatttgaaattgggtccatttttttctggatacataaattattagttcctaatctgatctgcaacaatttcaggaaacaattactgaattatctgtgcttaatttgagcagatgatagctaattccatgtgcccagaacctatctttgtaaattattttgattattttttttactagagagatagaagttttgcaggaagttaacatggatcaaggagtggatgacacacacatatgcatgtgcatgcacactgttatacaattgatgaaaatgtcataaggtgtaaggagcagtagaagtttttattagatagttcacctttaaatcctggttttgcctcattgccatgtggattggacatgtcagttcacctctctgagtctcagtttctacatatatacaatgggactaatcttcagctggctgtaacaagaattaaattagataaatctgaaaatgattaacacaactgaggacataatatgctcaataaaaaaatcatttgcaggtcttttgggaatggtacaaactggacctaaatcaagttatattattatagtacgataatttgagttatatttatataatatgaaaattattaataaataattgtaataacatataataatgtaatataatatagtataattaataaaatattacctcctacacactggttaaaagtgttcatgtactattaactctagttaaaatcttcgtgtgtttcttctgatcttagatcaagaggaatctcataatatttgtacatactgcccattctaagtgggctactagtaaatatacaaagaagctgtaataagcatatggcttagtatagaagagaagaaaaaatccagtaaattacgattttcttctaaaaaacaccatctggatgctggttcagctgcattatctcactaatttacattttattttctcaagagacaaaggtatattcaataaaagaagaaaatccagtttagaatgcttgtctctggaacctgtcagctacacttaatttctacgtagatgcagaaatgaggagtttcctcatcaatgtttaaacaaagcatagaattaatcactcaacattcagaagaatcaaagtcaaaatcaaaataagatactttattgaatttatctctccctgcagtttggaatttaatcctgactagaagtcaaaacaaatgcactttttagatgttgataagatgaaaatcaatcaatcgatataggtgttgtattgtattaaaatggcttaatggggttaattaaaaaccatcttagaaataaagaagataaaatacagattactattctaacagtagaagggactaaatatcgtgaagagtcttacagctgaaaactacctagaagctgagtaataacggacatttgaatgacttgctgcgctttcaagaaagtaaaggagatccccaagtttttgtttttgttttgtattgtattgttttttaaaaaggactaggagcagaaagaggagtggtaggagtggtaagtaagagctgaggctcaggatgacttgaaggcattgtgaaaattaatagccataagagaaaatggaagactagaccttgaacctggacaaagatacgtttgaatctgagatgtttgcataaagttagacactaagaaggttatattcgtggtgaaagggtggtccaggaaaaaaatccacctgccagcaaagagagatgtcataaaacctggctatgtccatgactactacaaatggaaaatgaaagtagaactaaaactcagaattcttcttgaggatttgtaactatcgacattgcttctgtggctttgtggttcaaacccttagcacagaaataaaaatgatttcttttttggaactaccctctggcaactgacagaagcaacagtaaatgctgtgtggaggaaacatgcttagataaaataactctcaatacgtatttgtgtatgtagaaaagttatcttttaagagcaagaataaaatagcatgatttcagattaacaaaaactgggtaagtttataatcaacaagttcttcctaatatagcatgcattcagggagaaacacaataattgaaataatatcaaagaggtttataagacaagaaagcttggtgataacaaaggagaaatcaagtgtaaataaacatgactgtataaaataatatgcattaaacattaaatttggcattaaacaaattagatacaacaaataaacagaataccatggcaggtaagctgaaaggtagatgatctaagttaaagcattttaaagcccttatattgtttacaaggagattaaaataatctgtaaagtctagtaaacactgaaactataacatgaattttaagtttgaattgaacagaatagggtcagggataatcagtgaatccaaagaaaagacataagactggaaaaaagagaaaataaaaatgaaaagacatatagtttagctacctcaattatcaccataagcataaaaagactaatttccctggttaaaatacagagattatcagaagattaaactattcaggaaaaaaaaagaactttatactatttacaagatttgtcagaaatactatttaaaaagatatgatgttattagacaatcaaagattgatatgactgttagaagaaatgaacaagtctataattttagtaggagatttagaaatagcattctcactaattaagaggtaaatctaatacaacaaattagaagctttgaatagtacaattaacaagcttgtaatttacataagtatagaaacctgatcttcaaaattagaaattaatattttctgggatttattgaatagtcataagagttgaccatattctaggccaaggatcagcaaattatggctgacagacctaatccagctcatgtcctgtttgagtatgaccctcaaattaaaacctttttttttttaacatttttaatggattgtaaatttttttcaaaaagacaatgtatgacagaaaccacatgtggtccacaaagcctgatatatttactatgtaaacctttacagaaaaagctgactcatgttataggccatagagaaaagtccaatgtatttcatatgtcatcattcaataaatatttatcaaaacccattatatgctgggcaattctttaggcactgaaaatgatagcacagtgaatgaaacagacaaaaatccttctgaggacacttgcattctactgggggaggcagacaaaaagtaaagtaaataaataaaatacatagtgtgtctgatggcaatcaatgttaagaaaaaaaatcagagaaaataacaattgttatttcgcaaaatttaatactcaaaggacatacagtgagccctccatatctgtgggttccacatctgtggatttaatcaactgtggatagaaaatattttaaaaaaataaaacaaaagttacaataagaaataattcaaataaaaatacagcataacagctatttaaataacatttacattgtattaggtattataagaaatctagagacgatttaaagtatacaggaagatgtgtgtacattattttctaatatgccattttttataagggacttcagcatttgtggactttggtatgagaaggtgggaaggagagaggccttgaaccaaccccacaaagacaggaacaactgtaatttattggttaaaaatcataataaaaatttaaaaacacttagaactgaatcataataaaatcagtacatattaaaatccttgagatgcaatcaaggtgtatgtttaattttacatgctatattagaaaaaataaagattgaatattaatgaggtgtaaggctaattgaagaagtaacaggctgggtatggtggctcatgcctgtaatgctggtactttggaaggccaagacaggaggaccacttgaggccaggagttcaaaaccagccagggcaacatagcaagaccttgtctctacaaaaaataatttaaaaaagttagccaggcatggtggcttgtgcctgtagtttcagttactttgtaggctaaggtaggaggatcacttggtcccaagagttaggggctgcagtgaactgtggtcaggccactacactccagcctgggcaaaagagcaagactgtctctaaaaaaataaataagccgtaaaaatatcaatatcagcataaatgagctagaaggaagaaagaataagaggtagaaattactgaagtcataacaaactatagagaaaattgcagaggccacaattcaacaaaaaagttgtttccttagaaatagcaatgaaatatctgctgagattgatcaacaaatatatatataataggagtgaaaattaaaatataaatgaaaacaagcgacaaaaacatttcacatataaaggtaagaaagacttgacaccggctgggtacggtggcttacgcctgtaatcccagaactttgggaggttgagacaggtgaatcatctgaggtcaggagttcgagaccagcctggccaacgtggtaaaaccccatctctactaaaaatacaaaaattagccaggtgttgtggtgtgcagttgtaatcccagctacttgggcagctgaggcaggagaatggcttgaacctggaaggcagaggttgcagtgagccaagattgtgccactgcactctagcttgggtgacagagcaaaactgcatctaaaaaagaacaactagacacaaataaattcggaaacttagatatgatgaacaaataggatccttggggaaaaaagtgtaatttaccaattgtgacttagaattattgtatctggttttgtaaccataaaacaaattaattcagtagtacaaaaactttccccaaacaaagtgacacttattatgcgcaggcaatttctaccaaactttcaaaatcatttcaggattatttcataaaatcattccaaaaatatgcacgtttccaaacttatgttaagaggccaatataatcttcatgcccaaacccaacaaaggcagtgcaagaaatgaaaagtgtaagaatataagggtttttttaacattaagaaatatattaaataattttaccgtatcaaaaattcaaaataatatgctcaaactagaagcagtccaaatgtctatcaatcaactggtaaatgcaatgaaaaggaagaaactatggatacatattacaacatagatgaacctcaaggatattacgctaagtgaaagaagccagatgcaaaaggctacatattgcatgattctattgatgcgaaatatttataaacgacgtatccaaagcagaatagtggtttcttgcatgcagctgggggtaggaacaggtattgactgcaaatgggcacggaggatctttctggagtgataaaatgttctaaaaccagattggttggacaaccctgtaaatttcctaaaaaatcactggattttactacagtggactgaatgtgtacttccaaaatttatgtgttgaaaccttaagccccaatgtaatggtattaggaattaaagcctttgggaggtgattaggttatgagggtggaggcttcatgagtgagatgaatgcccttatgaaagagaccacagaaggctctctcttttctgaaatgtgaatatgcaagaagttaggccttcaagagggcctagaagagggccctcactagaacccaagcagcctggcatcttaatctcttccagcctgaagaatgtaaaaaataaatttccattgtttataagtcaccagtttatgctactttgttataatagcctgaacagactgagagatttatgcttaaaataatttaaaggagacaaagtataagatcatctcaatagaaacaaaaaaaaagtataaaatacaacaatctatgcatttttttaagaatttcaaacaaattacagataaaagagaacttctttaactagattaagggtatttatttagtcttaaatatttactgttgaaacattacaagactttcctttaaaaatcagaaaaaaagccattcaagattatgatgtgggtcttagctagcaaataatttcaagaaacagaaatgaaggttttaagttaatacttaaattattaaatttaagtattaacttattaaatttaagtattaagtattaatttaagtatttaatttaagtattaaatttaagtatttaatttaagtattaaattatttaagtattaaatttaagtatttaatttaagtatgaaattattaaatttaagtatttaaatttaggggaaaaatactaaaattattctctgatgaacttattgtctacatagagcaaaaagaatcttcagaaaaattactggaattattaagaaagttcaacagagtttctgggttaaaacacaaaaaatacattgagtttctatacattaccaaaaaaagtgtaaacagtcttttaaagatacaagaagtgtgtaaaagtgaagtaaacgttataacacttctgaatataaccaaagtattgtatatctcaggcaactacttacttctcttaatagtgctcttttaatcatcctagctttatctgtatttgtgaaaactcataacccctacttagcattagttggtaaatgttgaaatttaagataaccttgtttcctgcaaagcactgttaagtggaatgctctggttccagaacattttattcttcctcctcctcgctgtattcagtcatacatcccagaagagatcagcaaaaaattaggaagttagaggtttacatttgtctttaaaacctactcaaaaaaatatgctttttacaattgctcttcagaggcctcccctgctctcattatctactataattacattataccttctgaaattctatatcaaaggtcagagcagaccctttaggcatgaaatgattcccagctcttcacggactagaagttcaaagtgcaaaaaatataattcactcagtttatcctcatggctccacccacccaggttttttcttacaaacacaccagttctgacaacctgatgttctttaaaccgtgagtagagatattgaagtaaatgagtctaccaggaacagaatttcacattcagaaatattaggttgtattcttcttgagagcaggacatctttttacctttgcagagaccacaaaatctggaaaaataagcactggcagaatgtatgtggaatatgtaaaattagatacgaagtatacaaggtctttcctctgtccccacacctctctcaatcataaaacaaaagtagaaataataaatagcatgactaggtaaactggcatttgaaatacataattcttataaaagccagcatgaccgtggggtgtgtaagagtggtgtttatgttactagcaaagctccttgctcaaagcctggagggactaaacaataatacttcacatcagcgtgatgtggtggagcgatcactgggctaaaaatcaagagattctgggcagttctgaccttggagacggcactgactatttctctgtcacctcaggtaagtcacttactttccctgggcctcttgattttaatacatataaatcgagggcattctaggatcctaggatcctatgccaaggatgaatacactttctgtgctgccaaaagtttgccgacatggtcagctaaaagcctcttcctctctccacattgtgggatgtgtgtgtgtgtgtgtgtgtgtgtgtgtgtgtgtgtgtgtgtgtgtgttgacatgaattatttccatcatttaaaaactcagaaagatggaattgaaagcagggactcgaacagatgcttgtacaccagcgatcatggcagcattattcacaaaggccaaaaggtggaaacaactgctatgtccattggcagatgaatggataaacaaaatgtggtagatacattcaatgaaatattacttagccataaaaagaatgagccaggtgtgatagtgagttcctgtagtcccagatacttgggaggcagaggtgggaggattgcttgagcttaggaatttgagaccagcctaggcaacatagcaagactccatctcttgaacaaaagaaaaaaatgaaattctgatatatgctagaacatgaatgaaccttgaaaacattatgttttgtgaaataaaccaaatccagaaggacaaatatcatatgattctactaatatgagatatctagagtagtcaaattaatagaggtagaaggtagaatggtggtttaaaaaggctggagagacagaataatgggaagttattatttatgggtatgagttcaatttgggaagatgaaaaagttctggagacagatggtgatgattgttgtacaataatagtgatatacttaatgccactaaactgtatacctaaaattggttaaaagggtacattttatgttatgtatatttcaccacagttaaaaaagcagctcaggaagatgaacaaaagtagcttgtgtttgtatttcatgctaagaatgcattctatttctcttttcccaacttttttaagaataaagttcttcagcatgacatcagatggaggggaagaggagtggaggactatttcttgagctactcaagtgaaaggaagtgcaatacttttcagtaagctgaaaataagctggagattttcagtttttatagtcttttttggcctctggattgctagagttcattaacagagccacgttcttggctaaggggccaccgtttttcttgaaggaagtaactgcaccagccactatcagggtacaagacatttatttgcaagaattaaaagaattagcacatctctgggatgacccagttattgcagagggatttaagcaaggaaattgtctagttttctctaagaagaaaaaaatcaagttgtctttacttaatgaccactgatgtagttttagtcatatgtcctgttccagtatatctgtctttttattgctatgcacttttagcaaaattacaagatgctttattgatgataggcacaaatgacctgaaagcttttttttttccttttatcagatgtgggcatttccctcagagacaattctggtcttttaatgaagatgaatgtatcagtgaactttgttatttattgatgactttcctattttctatgatggttttgttgtcactgtattttacttaggttagttatatccatcaacataatcttctttgttggaatactgggattaagatcaatctatctctctgttagttttatgcttttgctgcccaaagaaagcaacatgcaaaacacggccatgttgccttacaagccagatggtaatcagtagttaatagaattggaagtacagttaaggtttattcttgtaatttattcaaaactcaacaactctttaggttagcttgctaatttataactatctagtttttcctaaattcctaaattgaagataaagctgaattcttttttcaggataatagagcatgtattgttcagggttcaatttaggaagaaaaaccacatgaatattatgcaataagggacttactagtgacctaagaagtcatacaatatttgagaaggtagagaagtagagattaaagcatagcatagggagatcagagaaaagtcactacctacccttctgaagcactgaagcctacaaggataaatgagaagtcaggtaggaccagcttctggagagaaactgcagaggaactgttgtgcttgcatctgatgatgggtctggtgggcctggtagtcagcagccctagaggtctggaagaagagctggctgtgcacagggagagttaggacatgctggctcctcaccatctctgaccaggaccatgaccacctgaagagagcaagggcagctgcaccaattcatcctcagagctcccacagattcatactctggccaactcaaaccagagccatttaagttgggggactctgggaaatgcaattcctgcacagccatgtgacacagtacaagccccaaagaacagtgttttcagttgtcacagggaagaaactttagggttagcaaaggcttttcagcttccccagagaaaagctgctgaagagttgaaaataccaagtgttccagcattaacatggtgctgaacacctagacaccaacccactgctggctgcccagcttagagagagagattggcagggctgttgagcaccaggcagttagcctgggtggaaagttttactcagtatggcagggcggtcgctgtcatctaagaccatggaaaatttcagagaccctaagctagagtaaagtaggaccctaagacgacagccagagagaggaggagagccaagcaaaatccccctgggggacctagcgtggaggaggatcctaagaatcttcttcccaaatcacttaagttcgaggtttctgtttattggcagtacttagactggcctatttcatcatcatggtctctgtaacctcttcctccatcactttccctccatctccccctctattactcctccatcacttcccctctatctctctccctttgtctttccctccatctctcctcctccaccactgtctctctagctccctatccaaatttgcccctccatctcctcccctccatccttcccccacctttctccttgtgtctctctttctccatttctccccttccatctctccttcaccattgctctcctaccttcccccatcactctccttatcaccccctgaccccatagtcacttttacatagtaacaagattcaataagctctttgtagtattagaatcttcacaagttgcttcctgatctgcaaaaacttaacttgtactttctttagcccttacatcccaccatcccactcagtctctcttctctctctctctcccctctctttctctcaattgtttatacttcaggtctcagctaaaagtcacctctccaaagagactttctttgaaaacactttaaatgaaatatgttctcctccttctatcccattattctctatcactgtgttttgttctgaaatccttcctgacattcccacaacttaaatgatgtagttgtattttcatggctcctttgtcccacacactacactctaagttccctgaagactggaccaggtccctttatcagcagtgtctacccagcagctagcacaataccttgcacatggaaggtgcttattaaattcttcctgaataaataaatgagtgaatgaataaaaaatgaatgaatgaatacagtcaaattttagagctttccagaagggaaatattaaataagcatattctaattaatttttttcttaaaagacctaagctcaagatggtttcccattttgatttttgagatcaatcataggagtcagagaagcattcataagacagtgagaagcttctaagattctgtcatagttaccagggatcccaaaatgtgtacaacagtggaggaagaggcaaaaaggaaaaatctgcaaatcttgtagcctcagggactccagtggaaaaaaaaatggaggttggtgggagtcagttaaagaaggccaaaaatctggagaccggacaaaacaagttggggaaggaatattgagatctaccaagagaaattccacttgcctttataaaattggtaaatatttctttccttctctttccttttttattttagagagagggtctcaacatccagttgtgcagtcatagctcattgcagccttgaactcctgggctcgagctatcctcctgcctcagcctcctgagtggctgggactattggcgcctgccacaatatttggctactgttttgtttttttttcttttgttttgttttaattttgtagagatgggatctcactatatttccctggctggtcttgaagtcctaggctcaagccatcctctagacttggccttccaaagttcttacattagaggcgtgagcccctcacttggcaaaacttgtaaatctttatggagtgcctctcttgaaaaagatctgaacattgactagtcaagtgcagattaataattatcagcaatttattagcaacctgccagtagagccatactaaaatgaaaatacaattaattggggaagcattactgtgtatgtggcttgctgaaaatttactattttactaatctgtaagagaaaatgcttgaaagctttcatgcatgttatgaataagtttgcccccatatttcaagtgacataaaaaccattcaaaatgaacagaaacttaaaagaatattaattaaaaaatataacgtgaacatatataaactgtgtgtgtgcctgtgtgcgtgtgtgtttgtgtgggtctgtgtgttaaactttttttatctttttcagggactcaaatattttgcaaattttaaataataaatctatgaaaattaatttaaccctagactcaaagaaattatccattactattcaactttatctaatatataattaattttgcacattgtttctaaatagttgcaggtttggattatgatttcctgaaaatgcttcctttgatatttgcttggatgagaaagtgagaactcactcactgtatgtttgctaaacagacctatgtagttaaagagaagctgtccaaaaagattctctatttcagcccaatggagcatattcattatcagatcaaagtgataggattttttttatcttctcctaattgggggtaggcaatttccttactcactttggcaaatcgaaggaatgtcttattgtagagaaagaggctgtgatccctaaatgtcaatgcaaaaaccttcatcacatcactcttgtcccatgtagcacagagaatccattccattaaggtgaattctggaagctggctgaatttcaagctgtgttttaattcaatttttttttggcagacagttttaaagggaagtcaaaggttatagcttgataattgggtataaatacagtcatttcagtgggcctcagattcagtcatgcagaaccaatttttagcatggtgatatcacggttgcatatttttaattgaagcactcataaggagtcctactgtaatctgagtattactacatttttacccctcatgaactcaaagtataagttaatggtatacaatgaaatgttgcattgttgactttatctttcttacctacatgtctcctgaagcatagacttcgagataaaatgttttgttcattggttaaaaaagtgtctgtattctctaagctactaatcaataatagaagtttcttttataagtctgagtgcagcataatttatcactgaaaacttacttcattgctaaagcccaaacatatacacccaagacttttaaatcatgattttcctaatgcttattgtgcatttaaatggtaattttagactatgtagattattatataaatgacaaatttttattatttttacactcaagtgcaatgtctcgtcttaatataaaatctttaaatgtatggtttcttcatatctgttctgctttcttctatttgtaacaaaatgttacttgtggcctttattatttaggagaagaattttaaattgattaagataataatccagcacatattttttaagtaaaatatatgagcataaaagatttgcatggccacattttcttaatccagtctatcattgttggacatttgggttggttccaagtctttgctattgtgaatagtgccgcaataaacatatgtgtgcatgtgtctttatagcagcatgatttatagtcctttgggtatatgcccagtaatgggatggctgggtcaaatggtatttctagttctagatccctgaggaatcgccacactgacttccacaatggttgaactagtttacagtcccaccaacagtgtaaaagtgttcctatttctccacatcctctccagcacctgttgtgtcctgactttttaatgatcaccattctaactggtgtgagatggtatctcactgtggttttgatttgcatttctctgatagccagtgatggtgagcattttttcatgtgtttttttggctgcataaatgtcttcttttgagaagtgtctgttcatgtgctttgcccactttttgatggggttgtttgtttttttcttgtaaatttgtttgagttcattgtagattctggatattagccctttgtcagatgagtaggttgtgaaaattttctcccattttgtaggttgcctgtttactctgatggtagtttcttttgctgtgcagaagctctttagtttaattagatcccatttgtcaattttggcttttgttgccattgctggattaagaaaatgtggcacatatacaccatggaatactatgcagccataaaaaatgatgagttcatgtcctttgtaggaacacggatgaaattggaaatcatcattctcagtaaactatcgcaagaacaaaaaaccaaacaccgcatattgtcactcataggtgggaattgaacaatgagaacacatggatacaagaaggggaacatcacactctggggactgttgtggggtggggggaggggggagggatagctttaggagatatacctaatgctaaatgatgagttaatgggtgcagcacaccagcatggcacatgtatacatatgtaactaacctgcacattgtgcacatgcaccctaaaacttaaagtataataataataaaaataaaatttaaaaaaagatatgcatggcaaacttttacaatgaatatagaaaccatgaatagtcattttaccacccaggtttcttgtataattacactacttaaaatgtttagttgctgaatgctaatggtagacttagtcatattgacttagctattggaaaattcatgaaatataagatgactttgtgcctgccatttgggggatgaaatagaaatttcagagagagaattcaagcaaagagacattacaataatttatgataggagttttcatgtttagttttttatactgatggcagtggcggcccatctggaggagccactgcaaagacactggctgcaatggctaggtgcaaccatggctgtgtgctccatagagccagtgggggccaggaacaggcgggagccccagcccctaccaagttgatggggcaggagcccagtgttcctgggtgcaacagcagctgcccgactgtggctccagacctgggaatctctgcactctcggaggcctgggaagccctcctgccccaacaggcttagaagtgcctgcttctgccccctggcctctccctgctcccagtaccctctctgctgcagagcaaagttgtggctgaggctgggtgctgttgcaatgtggccaggtatgtgtattctcagaggtgctgacacgccagccccctgctgccttggccccctctagactttgggaacccaggagcatgggagggaagcaaaggaggggctgagggcagcttagtgtgggcctgcaggtaccccttggcaggaacagcctgggcgttgtggatggcatgttgatggcagcagaaggcagacaggctcctggacaaaaaggggcaggtccctggtgaaatcccaccttcaagcctgaagcctgtgggctgggctgccagttcctgatgaagtctgcagcccagagtgagaacttatggtgctttttctggccctgcccatggccacctatggactaatcagcatgcacttcctcccttatgagcccataaaaaccccagactcagccagacttgaacagacctcaggactaccagctgcaggaaggagctactgcctacgagtctcctctctgctgagagctggacactcttagggatgacctgcttgtggaaatgagcttcccacttcgggtctcctgagggctgttctgtcactcaatggagctcctctccacattgctcatcccccaattgtccatctatctcattcttcctggatgtggaacaagaactcaggacatgccaaatggctgtaacccaagcagaactgtaacaaacagggctgaaacatgctccccctccttccatgttgcaggcaatgagaaggagagaagagctgcatcccttcagggagtccagacctagggaatcccctagccagagctgtgacaccctctttggggctctgtggttcctggcatctccaaggttccagatgccactatattcccctcatctagacatgggtacacacagcagaagctgtgtgcagtacatctggtccagttacagccttgaatggagctggcacctgtgccagtgtctggagctgcccaccctactgccacagcctgcatgcctggctgtgcacagtgaccagaccctgcactcacttgcccacacacctctcacttctctgtgcctggctcacctttggtaggtgtgggatccaggacagtagcgtgagctgagtgcagcctgctgggccgagtgggtggaatgagcccagtgggcgtgaacaatactcaggcagaaaggtttctggctggcaaagagacactccatagatcccatgacaatactatttgaattgtgaggaaacaccagattgttctagaaggttgaatacgcactggtccaaacagatttcttgccttcctccctgcctgttgggggtggagtggaaaggggaaggtgaagattgtcattgtgtatgcatttgttttaaacctctgtagcctgactttccaaattgaaaaatacaactctgccattctgtgttcacacatgtcagagctgctgcagaaaactcctctttgactcattcatcgccattgaatctgaatttattttcagtggtatcctgacaggaactttaagactgaactctgcattttttctgttttcccagtcatctgcctcattctatgttgagggtttcactaatgaatgtgatgtttgctggtaaataagtaaataaatgcacctgtacaatttacttccttttctggaaagacagaaagaacagaatactagcacaagaaaactttttttttccctcctcttgcttggttctacttcagctcagttacttttgacaaagaaaatgaaaatttaaatttccattgaatgaattggtgtcatggctattatttaagagtatagaaattaaagctgcaattgggtcgtgtatcatttgcttaccctagatgcacattatatcctggtataatgaaaaatggcatgcttttttttttttctttctctgtagtgaaccataactgaaagcaggaagcattggtttacactttgcatcagagttgtgggatttctatatgggtacagtagtcagaatccattctaactgtgaatgccagaaacttaatttctataaaatgtaagaaaaatatgagagtgaatgtactgcctcaggttacttaaaagccgaagcagtgattgtgacttcaggtaaggcttcatccaggcataaaatgattgtcttcaggtctccagttctttctctccttccttctcttgatattgtattactttatggggactgtctcatgcaggtacttctcagctggcaggaaagatgcctctaccactccactctaaagtaaccttagtagtggctaccactctgtaagtgcatcttatgggcatccttcttcaaactttaatgactatgaggtatttacttaatcctcacaattattctgtgtggttatgacatttgtccaaagtcacagaattataaagattggaagtggatttgcctagctagtttggctccagcacctatgcatgcatataacccttgctctaagttgttacgctagagcttgagatctacagaggagaaagatgctttctctcttttaacctccctatcaatcctgaaaatgggatctgatgtctctgcatgagtccttgctcaacctgcaccaatctctgtgtcctgcacctcctcccatcagcatatgatattcatccacaacagctgaggggcaggttcagaagggaaaatgtgcatggcagaataaaatgttacaaatgaccactacagcaggccaagctgccaattttccagaaaggtccctggcattgcaatgttccatatggaaagcagctcatctgggtaagcatgcttttccatggctctctatgctttgtggtaatgggtagtgaccacagtatagcaggggcaaattgaacagctgaagaagaggatggaagagaagacaggactatgaggaagcataagggaggattgggcaagatggaggcagacatggtgtggttacctgagcaaatactgtagctgctaaaattcttagataagcctgaggttactttaggctcctatataacctagattgagctaatcagaatttcacacaaaaatccagaatagtgattagttacctttcgtgagagtattgactggtaggtggcatgaaggggctctctggaaatattttgtatcttgcctagggtggtggttacctccatgtaaatatataggaagttatcaaatggtacttaaaatttgtgcactttacctcatgcttgtgctagcttatttttttattgacagatataaacaattctacctgtgcagagacaagccagattgtttagtaaattaccatccagatttcctggattgcctagttaacaagctacttggaatcaaagccccccactcctcccaccctctcccggaggagtgtctgcacctgaacccaagtttcacaaattgccagatgctagcagctaacactcccagacatcagccctaaaaaggtggcatctgggtgcagactgttttgcactcacccccagactgtttttaccctgcttacaagacagctctcttctcattctaaataaaggaaagtggcccttctccaagaacagcctacggtgcatccagctggcccagccccaaggataccagtccacaggatgctgagagcacagggactctgggtactctttttccctcctacctatgaattacagcatgctgcaagtgatgctattaatgtgtttttggcattgccaaggtcattcttactaaccaacacctaggccttcttgcattttgatattattggacaatttaaagattcccaaattgcatctctgcgttaatgtgttagggatgccatgacaaaataccacagaccagatggcttaaacaataggaatttattttcttacagttctgtagtctggaagtccaagatgaaagtgttggcaggtttggcttcctctccttggcttgccgatggccaccctcttgcttactcttcatatggtcctccctttgtgcacctgtgcccctggtttctctcgcttttgtgtctagttcttataaagacaccagtcagattgcattagggttcatccaccctaatagcctcattttaacttaaccccctctttgaaggccctatctccatatacatttatattcagaggtactggggcttggggcttcaacatgaatttggggtgggacacaatttaatccataacagtctgttttgctggaatcaactacaatgactgttgattacaaggaacctgaaaatacttttttttatccgtttagctttttgctcagtctaattgaattcgtagaaatttagatggggtatagttcaagctaattatggtgcctgtgcacccagacaaattgtggtacaaaatctaaacttctatctggtgaattaaggataagtagaaaattaatatcatgtaatgtttgagaatttcagaaatgaattcccctttatttcatttgcagctgttagcctggaggaatttctagttcaacagacacaccatgcacgatcatgtcactgggcctttgcatgcaccgtgccctctctgggaacacttttccccctatagctaattacccagcttttctcttctctagaagctagttttgtccttacatctaaatatctacgctccgtggttacaggccagactggtgtcaaactcctgacctcaagtgatccacccgccttggcctcccaaagttctgggattacaggcgtgagccactgcacatggccagcatacagttttaattcaacacctcaaaatggacagcatcataaaattaagaaaatgtgatatgttttttctagttataatcatcatgttctaagtgcaattttatattccaattttttattaattatgtcgtaaacattttctgtgttactacagtgacttcttaatgattttatatgcagtggtcccattaatttagtagaataaaagttacacatgtttttattgtgcatttgggctgtttttcattacagttgtccctctatatacagggggaccttgaccacaccaaaatcagagcagattcaagtcctacagctggccctgcagaacccgagtatagaaaattcagctctccatatctacaggtttcacatcctacacagactgtattttcgattcacgtttggcggtggatgcagaatctgcagatacagtgcattgattatatttattgaaaaaagaaacctcgtataaagtgggccttgccatttaaacctgtgttattcaagggtcaactgtatttgcaattatagctaatgctgcaataggtatcttcttcctaataatagctattaattaatagaataaaatatcaggattcaggttgagagacaggaccatattgattactctggattaatattgtcattaatgcttgtccaaagtactcaactgccaaaggccaacagcagtgtgttggggttatatgtctatccttttggattaaatgttaagcaatgaattttagaaagtgtgtgtgtgttttccttccttttacatatactatgttatataacctttttttgctaattctaagaccggcccgttagaactattttgttgttgtatttggatagcatgcttggattactatagatggtgttccttattttagtactttctaggaatgcattttgatgtgaattttcacattcaagtctgagaaacattcctcttcctgttgccttatatttttacacatctcaccatgtccatcccttgactttgctttttattgctaaattcaattcctcttggaaatgacgggcctctgcatttgcagttagttatgcctttgaagaagattatttgcctcccttgagtttgtgatttcctaaatccagtgaatgctctgctcaaagaaagtttccttttgttgagaatcaattcatcactttgaaaaaaaaaaaaacttatgacaaaataggtggtcagatcatacccctagagtacaggaccttcacatctgttctgctgtagaattgagtagaatgaaaatctgaaaccagatttgtggttagcaaaagaacagaccctaaaaggcaatagtctaagtaaaactctgcatccaatttttattgcttctgctgttttgcttcagatatcttttcatattcctaagctgtcttcccatagtaacaaaactataaattcatttagtgggggataagaatagtggagagagggaggggaataaaaaatcaaatgggttgttggagcaataaagctattggtaagtttaatgctgactttaatctccagggtaaatgattgtgcaattgtgtcttacatttacaatctagtgagctgtgaataaaggtggtggggaaatatgtaaaaatgtgggccaggaaaccagctaacaaggtcataagctcagacacaaagaacctagttgattttcctggggcggaagaccctgaatccaggatattctaatcttggctcattagaccttaatgagggaagaataatttatatcaataagccaaaaatttatcttttctggcactcagagcacaggagcattatttataacttagaggcatgcaggtgtgttcccctaggcatctctttctatcaatattttaggagacttcctgatttgccgtggagaaaaactggagacatctggtattgtgtaggatggttgatacttttacaaaattcattcattcacatagcatttctttactcattcatttaatcttctggcgctgacatggaggtactctatttaggatgtgttcaccgtaagggtacatcttaaacatacctatgctttcattgatgtgacgtctataaacatgtacagacaggtacctgcaggtaaatggacaaattaaaatatcattatgagctacatggtcaattcatcattttttccagtcagaagctttacttggtttactttgttgtaaaattgtaactgcttttgtacaagctgccttctgtcctcccattctcatttccaccaccatctatagaggtatttggttgcatttcttgcctttattagcccacatggaatggtggccagatcccagaacttcagaatacacttacactgcttgtgttaagtaagagggaagataatgcagtgaatgggaacttgttgtcataaaaataatcacagaaattctacattcccattcctcagcagttaaaaattggatcttgccaggtatgatggctcactcctataatcctagaactttgggaggctgacgcaggaggatcgcttggggccagaagttcaagaccagcctgggcaacataatgagatgccatctcaataaaataaaataaaataaaatagttaggcatggtggcatgcacctgtagtcccacctacatgggaggattgcttgatcccaggagtctgaggctgcacactagcctgggcaatagaacaagaccctgtctcttaaaaaaaaaaatagatcttatttactatattgcactcggatagttattctggattatcctttccccatgccccatacctctagtatatactcaaataaagctattctttctgaaataattatcttttatgcagaagtgaagagagcagagagtaaaacctcctgatgtccattgcaatggctagaccagcaacattgtcttaagcccaaaacagtaggcagcatccagaatgataggcttgtggtgttcccaatcacatcctgaacaaaagcccttgttttatcacaccacaaacattttcacaagtgtgcatcttcccctggaacagatacagccactacctggaacaagatgaggataacctatcaaataaacacacagtcactgcatgggcctggagccccaattcttaatggcttaaaacgaaggagtgtcaaactcaactatctgctggaactagactgggtgtgaggcaggagggagtgggggatgctgcataaagttaaagaacccaggccttatttaaagggatcagatgctactcagtctgaatcattccggatagcgaatgtttcaaggaaccctccccttttaaaaattattagcaacaaaaaattcaactgtttataatactgtgcggaccaacactgccttagacaaatataacatccaaaggaatagattgggcccatgagcttactgcccctgcttcatgatatcctaactaaaagtaagctaagagaacaattctatctttaggggaaatactggggttgggtgccttcccatggatttgtaaatctaactcatgtcatccccttcaaaaggaatgacctgctctgtccactgccccctgtttttacctatcaatattttacccacatgtgtcagtcagaacagggtagttgctataataaacaaccccagcatctcagtgacctgataaaggtttatttctcattcacacaaaggccaatgtcatcctcctagttgagtgagtctcctgtaagcagtaaacttggggatttagggtccttcaaacatgtggttctaccctcccaagtcctccacttctagacatgtggacaaaagagagaaaataaaggataacgtggaatatttcatggctggacctgagagtggccttcacagctttcatcaacattggccagcactcagccacctgatctcagccaggtgcgacaattctgggaaatgcggtcttcccagttccccaggaggaaagtatcaagttagttttcacaggccagcttaaaaacctcactgatccaagagcactctctgataatgctaattagaaatacgcttgcccttccattcaattaatatatgtttaaaatacacctgcaagtcatattgttggccctagagacaaaatgataagatgacctccatatctttcgggagctgttgtttcagtagggaggcaggcattcaaacaactctatgataatatgatgggagctttaatggactactaaatacagtgggggcagatttgaagaaatgctctttaaccatgtggagcttgacactttgttgattgcatgcacatcttgtcttgttactgtatcataggatccttaagtacatagatcatactctatttatctttgtatcctccctattaccagacatctaggggttcccataaacatttgtcaaattgatgaatgaatgagtttctgatgaaaagggaataaacacagactcaccatttgagaagaaaataattagtctgtcagcttttaatagtttaaacttttggtacatgagataatataatattcttttgaattcttttctttctgatgcctcgaaatgtctatggtggctcattctatgatttccaaatagattatcttcaaataattcacaacatttagccctaaattacagtttcctgagtgtgtaacaagtggtgatttcatttaagcaacatgctgtatcatttatctgggctaaagtggatcagattaagtttcaaggcaattatgtcatatttttggtgagtatagtcattattagcttaggaactctttaaaggaagtcagtttcaaatgtcttctgcctattattaaatttactacataattaatttataaatataacgacttagatggtctgataacaaagttaaaattaactaggctgtcccttctttgtattgttggacgtattcaataaaagcaaaagaaatctcagtttctaaactatgaaccagaggccatcctcctgcttagttcagagtcgactaatctgttgtttgctaaataagtcttattctaacagcaatactagaaggaaatgagtttccaccatttatcatcaagtttcaaagtggatattcaaactcctgtcgggaatttgggggagaaaacgtttaggaatgcagtattatatatcactcactcatgagaaatgactccttgtttgccagcctaggaatcaaacttggagccatttatgtcaacaaaagactggggtatgtgtatgttttcacagatggatggagagtgaatgtaaaccaaagacaatggggtctttgcctgaaaacctgcctttatgcttatcatgcagtgaaaacaccttttttttctggagcgccctgaactttgtctatttagtctgggcctttttgatatattgcttcacattttgggggtatctgctttggctgtgtggctctctatctagatttgaaagttatttgttccacttgttctttctctccttcatcatacctggtggattaggcagtcagcagacgaactagcacccaggttctgttcacctgcacacctgctttaatgcatttagcattcagttggcaccagattctagacaaccttgccctccaatgatctgaagtctacttttttcttttatggaatattttaaaatatcagtgtgtgtgggtcttgtcttcataattgaattctaggctccataaaacaggaactgttcactgtatttcttccggacttaagacagcagcaaggaaacaggaagtgctaaataagtatttgttggagatggtatacccaaatatacaatagtatatgtatgaatgcattattgggttaaatctggtaaatctggggtctgggattcaaaatcctggacccatgaagtagaataggaaaaaaaaatttttattgttcactaactactaactgaaatttatatgtccttcaatgatgaatgtagtccttgaactccaaaagttaacagcagtgcctgaaacttggcctcccatggaagtctcaggtatttttgtgtcacactccacttgcggatatcttagaagtctcatttgtgttcctaactgcttcaaaagtatgctagctattaaaacttcaactaaattttattcatgtgctaatcatgacgcatattttaacatctgataagtttttaaaatatctatgcctattttttaagaagcatattttagtataaatcattttctttgtaatcctatatattgtattttattcatttggaaacactactatgtgaacagtccatagcaccaccaaactgccaaagagccagcgacatgattgatggttgagagccactgcttcagatctcactggcacataagctagttttaggaggctgctttggagtccagtgaactggttttagaagccaggattttcattttactgactgtgtgactttaggcaaatgacatttcccctttatgatgacccgaggtcttttccagctgtgaattctgtgatacttgttttcagacatgttaaaatatgccttacatcaaactcaataattttattaagcacttgaacacacaaaaaagtaaaaaagattcacaatataaataagttttaaaatggtttagataaatccttggctaatagatctattatggatcaactaaagtcagcctaggaggaaaggaaccttgtatgcacacccagcatttaaggttactggacaatgagacagctgtccccatgcacaacagggaccatttcaatatatactggaacatctctcaatgataaccaacagcttttccatggacattcagtgtagttaaggagaaaattagccatattttccttcagtgcctttgattaaactctgatgatgttttctgaaaaggaacatcaaaaactaggacctctggagacagacatgttgtaattattattacaaatacttagcatttttatcatcatcattaattacatttctcctttaagggtttatcataatctccaagcctgctatttgttcatttgttcataattatccatgagtaagcaatttgttctgtgttctcagaaattggttgtttaatatttggttcatttttaaaaattgtttcacaagggaggttcaaaaaagttgtgtttttcttcctttttcttctggtattaaggatacttctgatgtccttaattatcctggattctccctccatccatcccctacacacgaatgtaatgggggctttcagaaacacaatcgtaggatttttataaaattcggcacatcaatctaggaaaagaacattcaatggtaagacagccatcatctttgatatattaatatatttttgcataaagtcctcactttctcatataaattattccagtcttatttgacctttgttgtcgaggctgtctatcattgacaaagcagaactgaccacttgcctcaattccgtatcaaagtttattttccttcacctccctctgcccccagttcaatgctgaaaaggagccaggggagaaagaagtagcagatcaaaatagaaaatacctactttgtgctcaaataacaataaaatatccataatggcgtgtgttcaaacctctgtatctccaaagagtcgagcaacatggttagtatattaacctattagggttagccgattctaatcaggttcagtgtctgggcagggccctctgttttttgtgctagcagtttcccttgaagccagactatttagtggattcagcactgttcattttgtgtgaaagcccgtattcttctcttcatacttttcaaagatatgcttttctcattgtaagcccaggtcataagatgatgcctcaagtgcattgcgaaacatttattattctgagagactcaggtgatgaaaactctatgtgtttggtgtgtgattccttaaatgagttgtcatttatgacaatgactttatttataaggcactgttcctaagggaatatgagttttttgaccttgaaatacatgtagccaatctgcttggcaatttgtaattgtcccccctaaaatagtaagaacttactcttgctctttttttggaactatattcagccttgggcagtaaactataactcagctaaagttacataaaccctgaagggaaataaatttcaccactgttgattggtaaatgtcacagacatcagtgctatttatcaaacatttctggtttcctgccatttagcccaaagataagattttaatttcctatcccctttagggttcagcatggtcatatggctggatttggccaatgacatgtgggtaacagtgatatatttcacttctgagtgaagggattgagagctaatccatgatttatcatgccacctttttcataaggtaataatgaaagcacctagccaacttggagcctccatcaggctgagtccctgcatgactaccatgaacagggcagaaaccaggacttattttttttttttttccatgaccaacatagtgcttggcatattattaaaattctagaaatacttataagtgtatgggggtatatatgtatgtgtgtaaatatatgtgtgtatgtgtatatgtatgtacacgcacatacacagagagagaaagagagaagctgaataatttttctgagaatcaaccggaattcgggcaatctagcatgaaaaatttcacttgtagctgtgtttgtttcccttggtttcacttggttaactcagcatgttttataataacatcataactgctattattgactttattctaaaataggctattacaatttctgagtaactactttaagctagtgtgtccctcctttttgatgcctccctggctgcacttcggtcaggctggaatatgagaattcagtaggtgaaggaaaatatataaagagaaatataaaaatatcctggtgttcaagaaataacttaagtacttatatcttgaggagaaaatacagatcctcttcagtgcattagtcatgtaggtataataaatgagaaagatggaattcaggggacctgagatcattacagtgttatctcaccgagatgattttttttttccaacggtagaacctcctggcctgatcctattgaagaagaggagataaattgctctcttttgaaggtgcattaaccttaggttcatttaatgaattacctctcccaatgcactaacagataccctggggcctgagatgaaaaatggcctctcttctcactgagaggctcaaatacatactacttccttctttctcttcaacttgttttgactttcattctttatcctcttgtgatgtatatttaacatataactataatgtactctcagtttaaaaataagaatgggaaatctatcccctaacaagggcagtatgtgtttcttattttaaatagattctcttaacttaatttcttgattttcttaacctcattttctcctctggcatcttatggtgcaagctacctgccattcatgattctccaagacaccttaaggaaaggagtgctgggtgataatacagtaggtgctgcaaggatgtgagacgtgtagttaaatggctcagcagatgagctcagtgctcatcccatattcatagtcccctcagtagaggccattcaactgaatgctcttcctcttcctcctctgtagaattacctctcgagcatcattggatcgtgcattcgtttagaaaatatgtataggtaatcatcagtctttgagttcctctgaaatcagagcctgagataagaatctgggactattttaaagcatagatttcattattcaggtattatgaggccaacaggtcaggaggtaaccagcattgaaaagatagtttgttactcacagttcctaagaagagggggcagccatgccctgtggggccacacaggatagcaccaggcccagtcagcaggcaaaaggagtgaggggaaagggtgcacaggaggccttagagtggtttctgcaggaaaagccaggcaaggcaggatacgcaggtttagaattggcatttagggaccatctctagtggtctggtaccttgccctgggataattatgggaaagaactattgacccctcatgtttaagagtcatatagttcagagtatgcggtctggatgggttggtttggatatgaaaagcatgctccccagggctcatttgctatctctaagaactgactaaccctgatagaggccatccctccttggtcagcaaggccgcagtgccaaattatcaaaaatatagaaaactgtatacatagttaatccagggcacatatagtttatttgggaagtgatccccagaaaacaaaaatgaagaagtggggagagtgagacagtgaagcctggggctcatttccactgaggttcctctgggcaactatgtagaatgtacctcagaattgtccctacagagaacaggaggcagaagtatttattcactgactcccagcccccagtggttgagggttgtctgcagggacattcacatctatgcacttctgggatgagctcacacacacaggctgtgcataaggcttcagagaaagccctgagatagaagatttgattgccctgaaggcatttgaggtgggaagccattaggatgccaggaacagttcacctcttgactgcagttatagtgaagaggtgggccaaagggtgtggcgtggggcagccaaaactgtgtgctgcagcacaagtccccgaacccagcccttcactgaggaacatcaaagaagcctgctctttgagatgtaaaccataagatgatcaacacaaaaggggtcagagcagccacatacaaagtcaccttaaacgacaaatgaatcccaggctgcagggcataagccattccacctgcctaaagaaaaaaccctctgccaatcagaaatattttctgtcggctatgaaaacagagaaagaaaaaaataaatgtgataaatgttattatgcctttctgagcattgcacagggaagataaaaccccagctcaaggattaggcaggaggtagggatatcttcattttgaaggtgaaattttgcctgattcatgaagcatttaagttatataacaacaaccaaatcatcaaaaatttagaaaactacacatatgtgtatatatatatatatagagagagagagagttaatacatatatacaactttatatagttaaataaattatataactatatgtgccctctattaactatgtatctatctatctatctatctatctatctatctatctatctatctatctaaaactctctctctctccatatatattagtttatttgggaattgatcccagaaaatattaatcctctcttccctttccttcccacctttctcattcttccccttttccgtctcctctgtcttcactccttcctctccgcctcttcctttctgttcataactctcattgtttgtacatgtaacttggatcaccttctgggttggctttccaacactgccagcaagccataacatcaagatagtagctctctgtcaattacattttaattcacaaccttttcataattttcacaagaacaagtacaacggaacatcaaatctttcaaatcaaactgttgttcctttctagttggatttacattaaaattgtactgtgagagtgatgtagacctttaacaggcaaatgaactagaagacataggcaaaaagtgaggcaaacgtgctcctaccagcaccacctctgccacctcatatgtccacacacctgggcttcaagctaagaagcctccagtgccaggcatcctgctaatactcagggatcccattatcacttagccataaactaaattattagtgacatacatcctggattactctgtctgtatctcactccatacatccagacactgacacttaattatgttgttccacagtagatcaagttttacagcagcaacaaagattaaaactgttttatattggggacatttagaggataaacagcagagggttctaggagagaactatagtcagctttgtggccatctgggagaaaaccattcaagtgctattaatatttaaaaaccttttagatttttatagtttgcaatgttcctaacaaactgatctctaactccgcagtgaatttttggtgtcaaaacacactgctaagctatttctgagtctttattaacagagacagagctgtcagctttgtgctgtcctggtggcctggttgaaagttggtgtcattgaagaagcaaatctgagttttcggttgtgcatgagaatacgtccactggtcatcagcaggctctaggtctgcatgtttgtgtagttacctcccatcttctttctcttctctctcctttattctttttctttacttctttctttatcttgttttcttataagttttctgagtctatagaaatatgtattagagtattactttaaaagaagttcttccaaaatctatatcaaattaacttggcagaaagagccatagttgcttcttcccaaatagctctttctgcttgaactgtagtatagtatcaagacagacttcagagaaaagaatggtagctaacatacagttgatagaactgggagatgcttggaaggctgaggtgggaggatgacgtgaggccaggagtttgagactagcctgggcaacatagcaagaccccatgcctacaaatataaaaataaaaaacttagccaagtgtagtggcacacacctgtagtcccagctacttgagaggctgaggtcggaggaactcttgagcctagaagtttgagactgcagtgagccctatcactgcactctagccagcctgagtgacagaacaaaaccctgactcaaggaaagaaagaaagaaatgggagatgaatgatgaataaatagcctgccgtcttgcacgctggctcccaccctcatcctctcatttccccagccccgctgtcactccttcattctcctactctcacagccctctcttggtggttatgtacaaaggagcgggtgagaaaatctccaacctggtgtctatagtaaaaagcagcatcaggtattggcagaatcaccagattagtaatgagatgatggttgctgaatctttccatgcttcaattgggggagaaaattgtttatactgtgaaagtttaaaagaaatcaggtaggccaggtgtggtggctcacacctgtaatcccagcactttgggaggccaaggcaggcagatcacctgaggtcaggagttcaagaccagcctggcaaacatagtgaaaccctgtctctaccaaatatacaaaaattagccaggcatgatggtgggtgcctgtaatccctgctacttgggaggctgaggcaggagaattgcttgaacccaggaggcagaggttacagtgagctgagattgagccactgaacttcagcctgggtgacagagcgacactctgtctcaaaaaaaaaaaaaaaaaaaaaaaaagcttcttccagaaatcagtcaggtaaagctagataataaagggaaggaaaagaattgtatcaaccatacagtgttaaatcagagtttattagtgttgttatggatgaccttgattacatgatttcatgcatgctttaactgattcttatttgtgtagcattatttttaatcttctactttgaaaacttctagacttacagaagggttgtaaaaataacgcaaacaattctagtacacccttcactgatttctcagtgaaatctatctttaccatgttttttaatcattccataacatcaataatatgtatatattattaactcctgaattatttgaggtaacttgcagagttggtgctctttacccttaaatattttagagaatatttcttaaaaacaattatattacataatgacagtaccatgaaattaacattgattaaatgctattatctaacctttagatcttagtattccttatttttttcactaatttctgttacagtggaaggaagaaaaacacttttctagtccaggatccactccagagttactgtttgcatttagctgtcatgttcttccagcctcgtggttcctaatccttttttctttcataatcttgaaatttttaagagtataggcaaattattttgtaagaagtctttcagttttaacttttgtggtattaaagaatcgttttctaagcaatggggaaaggattccctatttaataagtggtgctgggagaactggctagccatatgcagaaaatttaaagtggaccccttctttacatcttatacaaaaattaactcaatattgattaaagacttaaatgtaaaacccaaaactgtgaaatccctagaagaaaacctaggtgataccattcaggacataggcataggcaaagattttgtggcaaaaacaccagaagcaatttcagcaaaagcaaaaattgacaaatggggtctaagtaaactaaagagcttctgcacagcaaaagaaactatgatcagagtgaacagacaacctgcagaatggacgaaaatttttgcaatttatccatatgacaaagttctaatatccagattctataagaaacttaaacaaatttacaggaaataaaacaactccattaaaaagtgggcaaaggacatgaacagacacctctcaaaagaagacatacttgcagccaacaaacatgaaaaaaaagttcaacatgactggtcattagaaaaatgcaaatcaaaaccacagtgagataccatctgatgccagtcagaatggtcattgttaaaaagtcaaaaaacaacagatgttggtaaggttgcagagaaaaaggaacgctgttacactgttggtcggagtataaattagttcaaccattgtggaagacagtgtggcgatcctttaaagattagatgcagaaataccatttggccgagcaaacccattactggatatatacccaaaggaatgtaaattattctattataaagatgcatgcatgcatatgttcattgcatcactattcacaacagcaaagatatggaatcaacccaaatggccatcaatgatagactggataaagaaaatgtggtacatatacaccatggaatatgacacagccataaaaaggaacgagatcttgtctgttgcagggatatagatggagctggaaactgttatcttcaacaaactaatgcaagaacagaaaaccaaacactgcatgttctcacttataagtgggagctgaataatgaaaacacatggacacacgggggaacgacacacactggggcccttaagagtggagcagggaaagggagagcatcaggaggaatagctaatggatgccgagtttaatagctaggtgattaggtgattggatgatctgtgcagcaaaaccatcatcgcacatgtttacctatgtaacaaacctgcatatcctgcatgtgtacccctgaacttaaaatagaagttgaagattaaaaaatgaaaaaaaaaagaattgatttcaaaaaaactaaaaatataacatacaaatataacaagaacatacaacaaatgcattatttaattcattaattaataaggaaactagtaagatgttaaaatcagtcttaaggagcatttgaggagctaagatatatggcaattttacccgagatgttagaataagatttctggcttagatacaaaattggtgaatgtcttagaggaccataaaccataatccttgggattataccttccattgaaaagaaataatttacatctctactggacaaaaatctatgggttaacgtctgcattctaagagttgtaaagtagtccaatcagtagtaagccaagccaaacactactctgcaaaaacactttcacctgttccaggttttggatatgtttttgacagtggtttttaaattatgtttcattgttggccaggactgagcagagggaaaactgtgaagaaggtacaatatgtacttgaaatcaggaagtacccacttcagccaccccataatatttctctacccctcccttctgccttgaagtgcctgagtcttatccataccagatatgccactatcgagaagcagatgacaggctcaggccttaccagggatgcacttgccacattttggaaagactacataaaaaacctttaaaaattggagccctttgggcctcaggtatccaaagagcacattttttggaaactcaacactcaggaaggtcgcatagagccagtttatgcaggtgagtattttgctcactcttataaggtccttataaggtcctcttcatgtctggtttggttctccttttcatgccctggtgagtttccctgttccccatatatgagtgactcttttttaaggtacctttaatcttttcttcatttagtttgtcagttaaccatgaagggctttttgctcaaagtttggtttcaatgttcatcataaaaatgacatcccaaaggagaaaatttacttttctatattttacacaaaaagagaatactagtaaatattgctaataattaaaatagtatatatatatatgtgttttcatagttttatagatttttaaacattgaatgatattcttagcgttttaaacagattatatctcattattgtgtgttaccattaggcaacaatgaaatgtttaaaatatttttaaagtattgtattttagttgtatcgagacatataagcctttcttaatttaggggaacaggaataagactacccactagacaattgaatctctggcctacagccaaattttacagagtttagatttaatgcttatcactttttttaagtgattattctttttaatttccctaagtcccccaaattagttttttgatatttactttttctgtgattattttgagaagtttccaatctttattttattttactttatttttgagacagggtctttctctattgcccaggctggagtgcagtggcatgatcatggcttattgcagcctctgccttctgggctcaagtaatcctcccatctcaccctcctgagtagctgggactagaggtgcacaccatcacatctggctaatttttatattttttgtagagacgggtttttgccatgttgcccagcctggtcttgaactcctggactcaagcaattttcctgccttggcctggcctcctttttttttttttttttttgagacggagtcttgctctgtcacccaggctggagtgcaatggttcagtctcagcttactgtaaactccacctcccaggttcaagcgattctcctgcttcagcctcctgagtagctgagactacaggcgtgtaccaccacaccggctaatttctgtattttcagtagagacggggtttcactatgttggccagacaggtctcgaactcctgacctcgtgatccacccgcctcagcctcccagagtgtttgaattacaggcatgagccaacgcacccagcctctcagcctccttaagtgctgggattacaaggtgtgagccactgtgcctggccagaagtttccaatttttaaaagttaaggtagttcttaattttctaattataagcattgccaacgcgtcagttctaagtgaatatgtttattagaaggcataataaaaagcaaaaattcgtcataaatttactgctcagagataattattgcttacatttgacacttggcatttttattattttttatacctatttatttacatttgtatactagagatcactggatatacaactgagcgtcttcatgttttcaataaaatactatatcattagtattatcctgtgtaaactttctcataattattatttaataatggtataatattcctttgggttaatggactataattcatttcactgctcccttgtggttggcagtttattttttcccaatttctcttttgtatagaatcctgtgagggcaatttttatgaaccccacaatttacatttacaaagttatttccatagaagagactccgtagagtgtagcaatctgctgggaactagaagcatatcaaaggctcttgacatgtgactccaccagtgcttatgtgtgcttatctcatggcctcctgactgggttcgagtttcatagattgttcagtcttttctaatagttgttttaaatttaatgtcattgaatagtggcttcattgagcattttttttcaaatgtgaattagcatctggacttctttttttttttttttttgtacgtgatctacatccttttagatagtggcaactggacagatgtaacattaatctgcactgtaggccaagtgcagtggctgatgcctgcaatcctagcactttgggaggctgaggtgagaggattacttgagtccaacccggccaatatagagacctcatgtctacaaaaagttaaaaaagttagccaggcatggttgtgcatgcctatagtcccagctacttgggggactgaggtgggaggatcactctgagcctgggaggtcgaagctgcagtgagctgtgatcgcaccaatgcactccagcctaggcaacagaaaaagatcctgtctcaaaaaaacaaaaaacaaacaacaacaacaaaaacactgtgtaaatgtatgtatgtgtgactccaggtgacttatttaacctctttgaatttccattctttcatttgcaaaatgacgataataatgaagacttcacagagtagtaagaattaaatgagatattataagcataatacttagcacaattcctggcagtggtaaagagccgttaaatgactttgttataattgttactaaaattataattaacattttttcaagtatctattggggaaatagatattttctattggcgtacatgagctttttatggattaaatacattattcatttgtcatatttgcttatggaaatattttccagtttgttcatgctgttttaaagtttgttaaattattttacctctgtttctgtgttttgtcaaaatgaggaccaaataagttgttacagcacttaacagaaacaaaaagtagccacaaccctttgggcatcctctaagcatttggtcattactatcattagcatcaggggacaggaatataaagagcatacagcacctactattcaataatgaggcagaagtcaagttgaaaagttcagttctgaagatgtcattcataatgataccaactcagattgtagttattttcaagtctaaacacttaaacatttattagagtaaataaccgttaaaaataagaggagaaaaattatcttctttcaagaacctgcctccaaatttatcttaacctctgaaatgcggccttcgtagtttcagctaaggccttgtttcatcagcatactgggtcataagttgaagaagaaaaaaactggagtaaaaaacttgaggtttcagatagtctcccccaccctctgggaattcactggtgactgatttaaatactgaaacttcacatgctactttgatgactatatattcagtcaccttcctttggattaaattgccatactcttattttttcaatctggttttctttgcaatgtttgaccctgtcacccaattacctcatttttggtggggtaaaggtgagaaaagatcaaatcactgttagtagctgcagaggctttaaaagactcatttaccagtatggttgtatcatgtttaaatttctaaatggctaagcaacatgtgccactctctgagtagacttaaaatgatgaaactaagtgaaaccatattaactacgtaaggggatcactaggatcccaggttgtgctatttgctagcaatcattacagtttatttaaactccgtgtgctagaaagttataaaatggcacaaggcatgatcccgatttgtagttcagagactaaatctatgagatttcactataggtaatctaactggtatttgtttaagttacagatacaatcagagcagcccttctcaaactttaatgtttatacagatcctctatacatctttttaacatgcagattctgattcagtgggcctgagattctgcatttgtaacaagctctcaggagatgcccctgttgctagaccatggaccacactttgagtaacaaggggttagaagcaaattatcaactgggagtacataaataattcactaggaagctcattaaacacagatttccaatgctactcccagagactgatttagcaggtttagggtggggccccaagatttcgaattcccaaccacctcccaggtgctgctgctgctgctgatctgcaaaccataatttgggtagctttaatttagaagtactcaaactccctgcatctcggacataaagcaaaagttaattatggtgagatgaaacatgggttagtggaaagtctcttaggttgtctagaaggaaactgggttctttgacacagagcttctctacagatctcagtttcctcacctgtaaaataagccaaatgatgagtgcccccctccccagatatctaacataccaagcagatgaatacacttttaatttgacacataagttttaactattttggccatgtctcctctaacattcgcaggacccaggacaagagtacaaatggacacctaatgccatatggataaacatttagtagttatacattaagccaacaagtacatgagacaatgatacaaattgcttattattgcaataggtgacttagccaatacgtgcaactgtcacacattcaactctaattcatgaatactgcccaagaccacagtttgttacatgaaagaaattgagatggatagttgtttctcctaggaaacaacactttattatttgagaatcttttgcacttaaggtattttagagaaaggatttgacaggttaattaattatttttccccttacctaagcacttctattgctaagtcctccctccactctgaaagggtgtccatctctgatgtctgcatttgcacaatccacaaccctttgtgacattcaaatgcagtctccttttattctgagatacaggaaaagagatgtaagcacctccctggggtctgaacagtgttaatgatgagatcagatgtttaggattatacatcacattctgccagagctgaacactgaatcccagtgaccaaagtaaattggcatgtgtataaaatacaggacccacggaaggggcacctatttattggatctagggcagtattattttggtggtcataagggaactgatacctgaacctgaatatcactcaaagatcactcatggtgcctgatatttggaagagacatttgaaggaccagacgaaccacttattcttttagatgctctaaaattgaaccgtataaaaagtagactatgccgaagtcatatcattttagctacatggagaaatcttgttccaaatcaagagataatgatataccctctggttctttgatgacagtgtggtggctatatgcagaatgtttctgcaccatttgcataactactgcttaagatatccactatgtcattcaatatcccttatatgagagttcaatgaggtagacgtccttaaatttactatcaggttaagaaaagagcagattgtctctttggacaacttcgtgtatttctttctttagctgcctggaagctcaacactaaatttagtattcatctgcaatacttgactcagcccatggtttttacacattaatatttcttttctctaaatgccttgttggaattgtacttttaagttcatctattttttaaaatgatttaaaataatcacattaacccaggaagaagcagcatataaaagaaaggaaagaaacaaactgtttaatgacctatcttgctgggttcctacaactcaagtgggaaaatatgtgcatggtagaattatgcaaattactgtgtaaaacttcctataatttgaaaggtattatgatattttatctacctcatgacccaagatggctgctggagttccagccatcatcaggttagagtatgtcagtgtagacagaaagaaaaaggaaagtcagaagagcaaaatgaaatcattttgatgtttttagcttttccagaagctctatgagacacttggtcacatgaccacatctactggcatggactactgaaaaatgtaacattttattcctggcaacagtgaacttagctaaatattaagtttctgttactttgaagaaagaagaaaaaatagatatagaaaatttcaatccctgccacaattctttgttcatattgggatgggaacttgttaattttttgttgtagaaatcacacatttggtttttcaaattgtcataaagttttaaaatatctgatgccacattggatagatttttattcaaatattttccacattttagacattcaaatcttacatcgcaaattagtataatttttaacaacaaagtaaatgagacggacaagacaagagacagataacttccagaattgttcatgtacaatttggctttgtttggggattgaatcaatggtttattttcataaatattgatttcttttcctggttgttttatgaaccgagtgggaagggccattgtattcagtctttgttttgttttcatttagtcacagagtgcagcagtgattgtggataattccttgactatttgtactttagattcacatcagatgataaattgagcatgagaaatatgttattaaattgactgcattgtaaattggcactttacattttttatttataaacatggtaccttttactcaatatccaggaaactttggataaatatgaatttccattaacttatgtgttaactgccaaaagctattatttatatctgaaatgaactaaactaagataatttaatcttctagtccaaggtcaagtgcattacaataaaacatgtttcatgaataaacatcattaaaaacacacagccattacatagcagtttttcataacacaaaaatctgcaaattgagtaagcaaaatctccactcactgaacttttaaaaatcctatgttaaattaataatctcacttcttctaagattatatactttattttttacacacagatagtaatgaatagatattcattgattctgatgtaggtggtgtataagtgactacgtttgtgtgtatgtgagtgtgaatggtataaaatattgtgctttgggaaagtcaaaattgggaatggatttaatgtctgtgtatcaatcaaccatgatatcaatgatgcacttataactcccttccccaataataggttttactttattaatcataattttttggtgggggtcactattagaaatttccattgtccaattttctcaccatgaccagccaagcatctatcacttgtttttaacttctcaactagttttcacaatttgttgtcctgtaaagtaataaatggcccaaattttccacacgctaattaaaattccatttctcatgaattctttaatcgagtgcaagtcattatgtgctttgttgatatcttaagtgcaaagataattgcaatgggcagcgtgaaaagggtttgattattgcctgtcgacgcttgtgaattctaataggtctaattgcatagcatcaattcatcatctcagcatcacttctttttattattagctctctgaattgtaatgtgctcataaagaagtgttgtagtatatcagagatgacatggtacctggcctattataattttcagcccttaccttgtgcaactcttgaaattaaaagtttattatggagtgccctttttctgaaactaattttaaaatgctcctgtatgatgaaatgaatactgtccaataatctacatattaatttgcctttgtaataattccattaaatgactgccaagacctttttcgctcagattgtgcctataaattcagaacataatgcattagttggaaaacatttgttaggctttttaatgggaattcctggtagcatttctcagagaatttctatactagagtgactatcctaaggctaaagaaagaaaaagattccactgcataatgatgtagaatcttccacgcaccccaataatatgactaaaggaccaccagcaattgagttgccaaacaccctatcatttgcatgtagggaatagaacagccctagtgtagagaaggaaagtaaacctttaattactctacagataaaataatgttctatatatgtgaggaagtgtgtctaataataatagacacaaatggggacttacaccctgtgtcaaacactgtactttaatcgttatctcaaataatctcagggattcttatgaataaagtttcagtgtgataattttacaggcaagtctcaaaatatcaccgaagatcaccagatggtatgtggcaaagctggaatttaaacatctagacagaagactcccatagcttgtctgctattttcaacacacactatggcatgactcagtcaaattaatgccatcagaatcagtaacagtgaactttggaagaaggatgatcatactgttaaagtgtgagtccaagtaaacccaaaaactaaatcacacttcaggggcttctatttttttttttaggataatatggtcagaagtaattataatccatgttaaggaatgagtcaagttcctagaaggagcatccatacagcaaatattccaagagatcaaggcaaaaccggtgaggcttatcaccttctgttggaagtctgacaacagccaacttagctaaatactaagtttctgttacttcaaagaaagaagagaaaatagatacaggtctgttggaagtctggcaacagccaacttagctaaatactaagtttctgttacttcaaagaaagaagagaaaatagatagaggtagagaatttaaatccctgccacaaattctttgttggtgttgggatggaaacttgttaattttttgctatagtaacaatatatttgattttacagaatcacttcaagatattttattggttttaagtattgggaagggatttatactccagcttttgttaaaggagtggcaaggccacattgccaaaaagcaaatgagctgagacatattgttttgggcatctctgggtaatacagcctgccacagggaatgagtcaacttggtgttactgcttgttgggcagtaaagcaatttgcaaggaagcagtcccccagcaggtataaattattgtttcaaacatctctctgaaaattactgtaatgagaaggtacccctttgccttgtgtgtgtgtgtgtgatgacaagcaaaagtaaaacttaattcattttctacagatcaaatgtttggttcttttttaaaaaaactttcaaactacgtggtttaggtataaatattttattgaatatattggttcatttccaaatataaaaaaaatcaagaagcaaatatggattctaaatttgctgtaccataagtaatttgcaatgaaacctacatctgaatagagaaataaattaccactcaaaaatttccattacttatgttctactttgaaaatcataggttggaacttacatggagctattgcttattctgtttaaaaagtatatagtcattctggttttaagaatttgagtaaaatttacagaataaaatgcaaaaatcttaaatataccatctggagttttgattacgtacatacatcaatcaatgtggagaatatttccatcacatcagaaagcattttatattaagtaatttttattgttctattttccctcatggccaatccagtgaatctttacctctcaaaggcactgctctgacctctatcaccatgaattatttttttcttttcttaatgtaaatggaaccatacacaatgtactctttgtgtctattttgttcagcatgaagtctttcatattatctatgttttttttttttttttttttttttttgagacggagtctcgctctgtcgcccaggccggactgcggactgcagtggcgcaatctcggctcactgcaagctccacctcccgggttcacgccattctcctgcctcagcctcccgagtagctgggactacaggcgcccgccaccgcgcccggctaattttttgtatttttagtagagacggggtttcaccttgttagccaggatggcctcgatctcctgacctcatgatccacccgcctcggcctcccaaagtgctgggattacaggcgtgagccaccgcgcccggcccatattatctatgttgtcacatgtatcaatgttcattattcttcattggtcagtagtatttcattgtatgaagcacaattagttcttccattctcccatatttttgctttttctgctattttttctagtttcctgatgcctcaaaattatttccttcatcacaccctctctgtttcaagaactttagccattcttgtagggtaggtctggtctgctcatgacaaattattttagttttcctttgtctgagaatgtcttcatttcccccttcattcctgaaggataagtttgctggatataggattctgggtttgacagagttttaattttatcatttgaaacatattttgccacttctttctggcccccattacttcttttgtttgtttgtttgtttctggtttttttttttttttttttttcagagatggagtctctgctctgttggccaggctgcagtgcagtggcatgatctcagcttactgcaacctctgcctcccaggttcaagtgactctcctgactcagcctcccgagtagctgggactacaggtgtgtgccaccacgcctggctaatttttgtattttcagtagagacggggtttcaccgtgttagccaggatggtctcaaactcctgacctcgtgatctgcccacctcggcctgccaaagtggtgggattacaggtgtgagccacatcacctgacccctctggcccccattacttctgatgaggaatccactgtaatttaaatggtttttctccaatatagataaggattcatttctgttttgctgcattcaagattttttctttgtttttagttttcagatgtttatattttgtcttagcatgaattcctttttgttgtattcagttaagttcactaaactttttgaatctataggttatatcattggccaaatgtgggaaatttgcagtcattatttctttgaatactattttagccccactttctttctgttcttctgagatttcagtgatatgattttagatcttttgtaatagtttcacaggtccctgaaactctattttttttgacgtttgtttagcctattttctattttctccttgttttccactttaaataatttctattgtcctgtcttcaagttcactgattcttccctctgtcctctccattatgctattgagtccagccactgagttttttatttcagttattgtattttttggttctaaaattttcatttggttcttctttacatcttctcttctttgctgagactttctatctgtttgtttgtttcaagcatgtacataactgtttattggagcatttttaaaaatgatggttcctttaaaatcttagttttaacacctgtgtcatctctttgttgggtctgttgattgcctattctaattcaagttgagattttcctggttcttggtataatgagtgattttatataataccctgtatgttataagactctggatctttttaaaatcttgacttagcagactttctctgaaactgtatcacactcacagggaaaggggattctgcctcattacaactgccatgttgtaggggtgaaggtccagttcctctttcggcttcctttgacactccagggaggcaggggtgttttctttctgctgagaagagttgggatttcagaccctgctgggcttcagctagtgccaccttggctgggaggggaaacattgtcttgttactactccccagttagcttccactgacccagtagtgaggaggcctgctgggtggtagtaaaagtgccagcttcctatgtggtctgctctgacattatatggggaggggggttgttaccaccagcaagggctgaaattggcttcctaaccagcctcctctgataccactcaggacaggaagtgcctcggtacagtgaggtgcaggtagaaatctcagctccccactggacctttgatgacaggggaagggatgaagccttggctttgtctgtgctgtatggttggaataggatagtttttatctttctgttttgttaggtcatccctttcctgtggtggtggtggtggtggtggtggtggtatttatttatttatttatttatttatttattttttagtctgctcttgttagcatttctgggttgctggcttctttgggacccaggctgaaatctgttaggcaaaaagaaaacccagaaaactcatcaccgtgttggtcctatgggctgccttcttctgttcacctttcagagtcttcttatatttgttttatgtatactgtccagggtttttagttatagttagcaggaggaatagggagaagtccatctgttcaatcctagtccagagctagatattttttgcttttctgtgagtattttaaatactaggtcttggtgagtgctaaagttaggaaaagatgaaaataaccttaggcttagaacagtgcttgccacatgttaagcactcagtgaggatcatcttattctctttgtacaatcctagtgtctctgaaattctaatcttcttttgtaggacaggttacgcccaggtttggaagaggggtgcaaagggagacatatccaaaatcctcacctcactagtggatgcagaaaccttcccagcatttcttaatacacatcacagaggtagctgttcctggcctgttcatgcttgtggctgacagtacatgcatatgtataaacacacataaaacctccaacttttacatattgatgaagacaaacaaacctaaggccaagacatacagactctgaaaatctttccagaaggacataggaagggatctacttcagttcctaagaggatggtaacttttgcctatgaatgtttgacctaatgttttctaatgccaggatggttctccatagagtttatttgtaaaataaaacattgtgctttctatggagactctttgtaattctattcctaaagaaatccctgtgatcagctaacataaccacatctgagggcttcagatcttctgatggacttgtgtcttttccaagcatcactgtagttcatctctctctcactatttatgaactccacgtacattttcactgctgtcaattgactagtttgcactgaaatatccaagcaagctttgtgaaaaaatggaagtggctctcagtccttagatttgtaggcagttgtgtatggcacatagttttctttactatatgttctttccagttattggtaagaaaggcagtcacagaggatttgtccagtgggactccagtggcaaaggtttatctgactctttccagtagcactaaaaacacccctggacagatttcatggagttaacagactctgttttcctggtcttatttagaagtattgccttccgtgttttgcatattctgggcacagtcaatatcaaataattaaccatttcatctgttcaagcagccatccaccatctactaactgtcatgctcctgaatttacaggcacgtccagcaccgtttcttttattcttttcttctgtttttttttttttttttggtttattttgtttagcttttgttatggtttagacttgtgtctctgcccaaattttatatcgaattgtaatccccagtgttagaggaagggcctggtgagagctgtttagatcatgggggcagatttcccccttgctcttcctgtgatagtgagttctcatgagatcgttgtttaaaagtgtgtagcacctccatactctctctcttttctcctgctccagccatgtaagatgtacctgcttccccttagccttccactatgattataagtttctggagccctccaagccatgctgcctgtacagcctgtgaagccatgagccaattaaaccacttttctttataagttacccagtctcaggtatttctttatagcagtacgagaatggactaatacagcttttttcaaacgtacaattcagtggtgttggcacattcacagagttgtacaactgtcaacaccactatctaattccagaatatttttgttgccttaaaaaagattctatacccattagtagtcagtgttcattcccccttccccactccttgacaaccattaatctacattctgcctctgtggatttgcctattctggacatcttatataaatggaattatatactatattctcttttgtctctgttttccttaacttagcataagatttccatggttcactcatattgtagcatttatcagtactgctttcctttttatggctaaataatattccattagatggatatacatttggttattcattcatcagttgatggacattgagttgtttccattttgagctattataaataacgcagctgatgtggtttagatctttgtcccctccagatctcatattgaaatgtaatccccaatgttggaggtgtggcctggtgggaggtgttttggtcatgcaggtggatcctttataaatggcttggtgccgtcctcacagtaatgagtgagttatcactctatgagtccacgtgagagctggttgtttaaaagatgctggaatttcttcctcactctcttgctctgtctctcgtctcttaccatgtggcatactagctcccctttgccttccaccatgatcgtaagcgtcctgagtccctcaccagaagcagatgctggtgtcgtgcttcctgtacagcctgcagaactgggaaccaaaataaacctcttttctttttaaattacccagcctcaggtgttcctttatagcaatgcagatggactcataaaacagctatgaatatttgcatataagtttttgtgtggacatgtgttgtcagttctcttgggtagatcctagcagtggaattgttgagtgatatggtaactctgtgtttaacattttgaggaactaactgttttccaaagtggcatttccattcctatcactgatgtatgagggttttaatttctccacatactaacacttattaatatctgcctttttgttgatagccttcctaatgagtgtgaaatgtcatctcattgtagttttgatttgcatttccggaagaactaaggatattgagcactatttcatgtacttattggccatttgtgtatcttctttacaaccatttctcaaacccttctttgactcctccttaaatctattaaaagacaaattacatgcttagcttttttccttcattttggcctgttcactttttggcttattttagaagtatgctttctttaaacttcctttcttctcacaattagtgcacatgcacaccctgatctttttataatttaaattatttcaactaatgtctcaattaatgtcatcaatgctctgttgacatttaatccagaatgagctcttcctactgcaaaatgagctctttttttggcgctttgttataatttatgagaactaaagtagagagtagacaagttttacttttggacaagttttgcttccacatggaaggatttaaaatgatagcttgtcattagtgtgtgcgacaacagggcaaggcaagccaggagaggcaacacaggtcaaggtcattaacacaatataatgaatgaaagatcatagctgtgggtgcagttggtgtgagtctggtggacaaaaacaaggtcagagtcttgggtgccaagctgacactcaaatatcagtgatgggtaaaattttggtaagagagctgtacactgccatatagtacaactctacatttgacattttgagtctagtctagactggtagttttcaacctgtggttcctaggccagcagcatcagcagcatctgggaacttgttaaaaatgcaaatcctttttctccacccctactccattccagacctactactgaaatagaaatactgagagtgtgacctagaaactcatgttttgttttaccagaacctttagatggttttgatcgccctcaagtttgaaaactactgaccaagacttttaaggaggtgcaaaaagaaaaggtggttggagatgtcgccagagtttaggattaagtgagaacacacaacaacaagggtatggctgtagccaaaagcaagttaagcatagcccatgctacactgctaccatggaattaggcaacattcacttagccagaatttacttagtgactggttgttggaataggagagtgggccctagaatgaaggagacctgattattctggtgcagggaggttcaaggagagcaacccacgtccttacttgtcttcaatttgttatccctagtgtatcaggcattctgcttgttaaagggatctgttatattttcttctttggacttaaattactcagtataaataatcagcctcattctgcatgcattaatgaactccattagaaggagggaccattttttttttcctatgttggttaaggaggcctcttagcaaaatctaaagggaggtcttctccccaaagaattgtttttgtaggccttttccagtcaagaactgtgacagagattgagtttatgctgggtgcagggaaacatggagtaagtcacgtccataaaggtgaaggaaggccaatgttttggcatgggtaagttgctaagtacagtgtgggtgcatctggctctcacccttattccttgagtgaagtcattcatccaagttggcaagagcaggtcataggaaaaatgaggacatctggaagagtaaatggtttgtgagaggggccatctctcagataggcccataggctttctctggaaggatgtcagaaagccacatttatcagaagctgcaaacacagccagccatgtcctaggaaggacagtgctctttctatcacaagagaattccaagggcaattttctgttttctttttttttttattttttgtttttttgtggagacacggtctccataaaagaaaccagattggtcttaaattcctggcctcaactgatccttctgccttgtcctcccaaagttccgggattacaggtgtgagccatggctcccacccccttcttttctgacagtaggaaaaataaaaacacttttatttcatttccagcttctgtgctttctccagctctttttcctatctgaagaagtacacaaaaaatatctatgtgacaaagctcccaagccaggatccagtatgactttatttttctctggctgtgtccaggatcatggtgacttgacccatttagaggaatgccaccatatgctgctagcaactgctgaggtttggcatttcacaggtttctcagaacctaagaactaagtgaggactccaagaatattccatggactctaagtccatggctagattcccaggcccagaggatacatttggaaaaggaccaaagttgtcgtcatgaaattctatacattgcaagcctgtaatcccagcactttgggaggccgagatgggaggatcgcttgaggccagaacttcaagaccagcatggtcatcatagcaagattccatctctaaaaaaacaaaacaaaatgaaacaaaacaaattatataaaaagaacattaaaatgcaagaaataacaaaacatatttgatttaatcttgtgaaaactttcatattttcctaccaataaaattgtctatgacaattcctttagaatggttaatttggttgtttaggatttttattgtatagcagtgtcaaacacattcttgccattcacttattctgttaaagagaactattgacactctcctaactgttgctccttcaggaggagataagcagtaagactgttaaaattctatcaaaatactctattgatatcatgtgctgcggcttcaaaacactactcagtaaggatgctttggaaagtaactcagctgcctaatgtgtttctgctttaaaatatctctgggcagctaagtttgtaacaaggcatataaatctaatgtttagggtaaaaataaatatcccttttggtccaagcagtttaaatagtacttgtaattaatgcataataattaggtatctaaaaacaactcttcaaaactgaactatagttttctggcaaatgtgtaaatccatgtttatttaaagtgtattatatttataaaagatgaggtataaaataaatcgggcttaaaacaatgctgtcatcaattctaaatgaagcactatgaaacagctagttcaaagtcatgaaaatattgaatattttttttctcctttttctcctgtattttgtgtgtgtgtgtgtgtgtgtgtgtgtgtgtgtgtgtgtgtgtgtattttcaaccaggaagcatatgcttttttatcatgttgggaaaataaaatcctaccttttaaccttaaaaaaactatgaagatcttagcaatttctacaattcagttgtttgttaggtgaggaatacattccttgttaaaatatctatttgcataatttggtgagcaattacattactagtgttcttttcttatttgagatactctcccaaggaattgattatttgcattacaaataaaaccctgatgaaaatacataaaatacataaaatttgtataaaactatatatttatataagttatcagaaaaaagtgtgaaggcatatgttaagtgaattaaaatccactaagggcttgttattaccaagtcttgacctaggcaacaaacatatttatatccagtcaaaaggttggtagagaaaataattacatatgacaaaagtagaagttataaaaatgatgttccagtaagaagagaaagaacaaccagagaataaaaattcttggaaataagaacaaaagtttcagaatgaaagaatgcatgatggaaaggaaacagctgaagacttactgtaccagaagaataagtcaaggaaatactctataatgtacagcagataaaatatttgagagaaaatcaaaggaaatgagatttactcctagacatataaactcgcctattaagagttctagaaagaatggagaaaatgaaagagtagtaataattttataactagaaggagaaaaatgtcctgtcctgaataaggcatggtgaaagttcaaaatcccaagtataaaaaacagttagaaagaatgaataagacctactatttgataatagtacaaaggaactatagtcaataataatttaattgtacattttaatataactaaaaagtataattggattgtttataacacaaagggtaaatgcttgaggggatggataccccattattcatgatgtgattattacatattacatgcctgtatcaaaatattttatgtaccccagaaatatatacacctactatgtacccacaaaattaaaaattaaaaaatttaaaaactgagaaaagaatttcaaggataaataggaagttgataaaacttctggaaaggagaaaaaataaaaataaaaaacagcttacttatggaggtataaaaataaaactgtctttttctcacagtagacgtgaatgaagaaaaatcttcaacattcggagagaaaaaataatttttaaaaattagaaattgagtatcttacataacaaaagaaatgagtagtattacggaagtctccaatttcttcccttttcatgtttttaaacccactctatattgcactttgtcctcaggcttcgaccctcacgacggtaagctgactgtgacagcgacaaactttcacactgagaagtcaaaggcagaaatgatggggattattttcctcactcatcttattttgagagtaagcgcttttctcagaagacgcccgtgaaactgctcctcacattctctgcccatttgcttctcaccacagtctatcctttttctttgcttcatttttctccttagcacttgtcactgtttgacacactatgtattttacatctttcttgagaaaaattaattttgaacctggaagcatatatgtcagaaagacagcattcagaattgagaacaaattaaaaacatttggaaatgcagtggcttaggaaatttccagccacagaccatctctgaaagaattactcaagaatatacaccacccgcaacaacaaaaaatgagtttaagagtgagaagaccaggcatccaagaagtagtagaagcaaagaaaccagtaatatgtcagttctgacataattggttaatatgtataatcatgaactttgagagtataatgatgaaatattgactaaatagagaagaatgtattcctatcccatgtatgcacgtggtaaatgcaactacgtagaagtactagtgataagtagtacttctcatcacctcccacatgccaggtactcgacttgatgctttcacatataatacataatttattccccacacaacaaacttgacaagcagatattatcctattttttagagaggaagaaaagtaatttgccccagttcacacagtgagtgagtggagtgtgctgttgggttatggagacttgtttttcttgctctctcctgatatcatgctgtctgataataattacacattctattgatcttttttttctgatattgtcagctactgctgtgtaacatattttcctactcataccaaatcttcccatttttactgccgctaatttctttcattatagtgcctctcaagccattttctcatatcatctcaaccacaaccccatttctaaataaagaacgaaaattgttattaattgacctgcatgacaacagtatattatcagggagccagtcaccagatattatttattttcaggtttttttttctttttaaacctgatactcatcaaagcctgcatgcaaacatttcattcttggcatctgaattactgtggaaaggtctcttggttttcttcgagtgcttttacattaatggtttctactaaataatctcgcagaggcacatgttgacctctgtgctcttagtctcgtaatgaattatgttggaaaggctcagtgatatattctcttcccctcactgattctatgtcaggcccaaaataggcaaagaaagggaaaagttaaaaaagaaaacctgtcttgatactgaacaaaatgagttattttttattgtccttttttcttttactcttaactaacacttctcttattcttgtcccctttctgcatcttatttctatgttgaggataggctctcagaagacctgacaagcactgcagtaactcacaccccaattctatttccattctatttccctatttctgttactaactcagtcacttagagtcaagctccttgaaatcaatttttacactttgttttctcttttcccatccactctaaaaccatcatcacagtttgccagttcaactctaagattcttgaacggtctgcctctctttttcacgccttggactctgctttcatgtcagctgatctcttcccttttgtagcctccaattcattctgcaaaggagtaagcatgaggaagtaaaactactgtcatgattttgcatgggaattcatgttcccaaagaatatctcttggctttactccatgatgtcttatagaattcttgtttaaaaagctgctcccacccttctcttctccatgtgaatcagtgtatctgatagcagtcatgttggacttttttccttgagtctttgcaaactctttaagaagtgcttttccattctcaagaggatggtgagtggaaataccccgattatctcaaagaagaggaaaaagcaattactccggattttgaagattgagcagaaaacaattgcatttagttaaaattactcttaaaaatcccagcactttgggaggtcgaggtgggtggatcatgaggtcaggagatcaacaccatcctggctaacatggtgaaacacttgtctctactaaaaatacaaaaaattagccaggcgtggcggcgtgtgcctgtagtcccagctactcaggaggctgaggcaggagaatggcatgaacccgggaggcggagcttgcagtgatccgagatagcgccactgcactccagcctgggcgacagagcgagactccgtctcaaaaaaaaaaaatcccttaacctacataaaagtgaaattggtgacataccagttcaaaataagttcaatacaaatgattctccctatggagtcgaaagacatcactgtttcttcaaacttgaggacagataaaatagttaatgatgttgcattggaaaagtaaatattatttattagatctgcacagtgagaagctataatgtagcagttctgaaagtgtcaccagaaagtttgaaaatagctctagtgcacagtaaacccattatctctgaaaagtaggtgaggatattgactgatctactgggcccagcaatgtaagccaccctgctcctactcctgctgtaacactcactcatttaaataaatttaaataaattgcccttattatttaaatattttatcattctcagtccaccaacactttgttcatattgttgaatttaaatgagttgaacttgtaaaataatgtaacttcacagtatagaaattttcacatattcttttggctagaagttatgttaatgtaattcttgaagtagcctcttctcatttgtcttttctaaatacaacagttccttaagaaaatgagatgtagggcctggagtgaagacgtagagcctaggtttagtgcagagctgtcctatgaatggatcaatttcagagagaaatcagatccgctttattttggtggagaggtggattcattatatctaaatgctactttttaaagaaatgtgaatagtgagcccattaattccttcagagggtgtctagaaagtctgtcatgttccattttgtgatttgagagccaaaacctatctctaaaacaaagcagatttattctaaaatgagcaatatgcagatgagggaaatgacaggtttagagaatgcacttatttaatcatctcctgaaaaaaaaaaaaaaaaggcaaagggatcactgcacattttttttttttttctgtttgagtctttggatagaatctcatagcttttgttaaagagtgtgatagtgttagaatcttatttttaaatcttccatagtgcagtcattaggagatttttgatgaggttttgatgagtctttctatgaagaaacagcttttcagctctataaaatgtatgctgaatgagctgaaccagtataactagatgccattgcttgcccagtctagattatcccttctacctcattgttttctctaatctggtacatcattcctgattagattgattatatcgggccaacttttatttaatcacccacagattcactaattatccattaagcaactgttcccatagaattcttggctttgtgggaaacacagacatagatttgtcatattccctgcagtggaagcatcgagtcactgcaggaaaacagaaatcacagaatcatgacattgcagagttagcaagaatcttgggacataggtagtcatatcggattgccttgaatgatagggcattccctgctgcctaaggcaggatgccatatgattggagagctctgaccgatggaaacttctcagaaatgttcgtgttcaaagtcatattaatggtttatcgtaagtgatattatagagcaacagaggtgaagtgaattcaaactctgttcatatagaggaatttatggatctcatctttaaggaagcgaaattcttcacagtgtaggaatctccatgagaaactatttcataagaagaattttcagagaaaaaaatggggggggctctccagaaatggggaaagtcctgtagtcagaaaagcacagacctgtttggtgagagtcatggaacaattgccctatgcactggcacatagtgggttctcactaaatatgtattatataaaggacagaattaatgactgagtggatgattgcagaagagtctttcttgtccaggcgtgtggtggcacgggagtggtaaaggaatgctgacgacaagcacatgcaacctcagcatcagcctgcgtgtcccgacattgacccatctgcacatttcagtcccagcctagattctgcatttgtagaattacccttgcagtggggactaatattcattcattttacccacagtatagagtctttaaagccgattttctcctcacatcttaataaaatactggttttgcatctctctgaaaaggctgcaagttgctgacatctcttgaaccagaacaaagatcttattatcatcttccttgaaacagtcatattgtctatttggaccttcacctcctctcacccctgctattgaagcactagaaatgccatgcatttgactcacttccttctgggatgtgttctctttgggttcattctaaaatgacatgaaatgttggaattctgcagataattcagcttcccacatttcctctgagacccctctctgttggaaataacactattgtgatgcagatgcccccaataccctgtggaatctcaaaactatcaatggctgaccacaggatatcccttttccatgagtttcaatctgtgttattaaaaagggacccttacatgtaggagtccaatttgaaacaggatacagtcccatcaacaaggtcagtctcaaatagatttgtgcaggaaagggagagctgataaaaaattaaacatgagctttgcctctttcttttttaatatagaggatggcattttggtagaaattgattgaatgatattttataacgtgggcttaaaacatcacagctttgaagtcaatgaagaataaaacatattatcagcacatgatgccccaaacataataacattatcacattctcatgtaaaaatggaaccaactttccagttgagctgaaagtatgcatttgagctttggcagtgcattctgtatgcctctatcaactgtaaaatgcaaatgtttagttgctgtgtatgtaaccttagacatagatatcttatttagagaaccatagcatcaaggagggtgagagaggtaaaccaaaagccctttgtaaccaagaacagtgaaaaacagcaatgggtcaactcacaaactcaaaggaaactagatttaaaaataacattgtgaattctagtttatcccaaactcatgcaaaaagttgaatgactatagtctttccggacatagacagaaatccttcatacagctgaagaaatgtatgagagtaatccgaatttagaaaaatgctgcagggtgtgttgaagtacattttcaatgatatcttcggcagattgaaaaggaacatcttatagacaattgattgtttcttgaaatataataaaaacaaacttcgaaatgtgtatatgaaaacactgacctatgtggaaagaagaggcagcatttactttgtaatgctatcaggtggtaattcaattttctgttaactgaacttcaagtattctgtttcaggtcatagattggtggtgcttatataaattggccagtaagatttacaaatagtacctttagtgctcagttttgtggttgtatctctaaaaaagaaaatcagtttaattccatgcattggttttcttcttaaaattcatgcaatttgatatgattgacaaggcacagcattattatgcagtctgttagaaggaccgattatgcttatgaatacaagaatggagtgaatgaaagcaatgtgtaattgattctacacttggtctgactgttcattaacagtttgaatgtagcgcagttgcttctcaaatggaaaatgatgagagcaacctatctgtgctctctcatttgttttaaaattcattatgctaatattttttcacagaatgtttttgctgcatttgttttgccaaggataagtctgattgaatctttgtaaataattctactgctttcaatatttatttggcatttcaatcacatatttttcaatttacacttttggaaatgaaagtaggctctcccccacacctctttcaaagaaaaccttatatcctatcctccttttctctataattcagactaatttcccaggataaataggagtgggggagtgcaaagtggtgcgatagttatctcttcagaacaaagaagctgatttacagactgattgatttcagaaatagatgagcaaaaacagattccatttgtcttgccacactttagtctgatgaagcacaaaagggcctgccatctcattttccatagctcttcaagaggttgcatttgaaatgctgattaaatgtacaaatcgcattgctgttttcgtggctttcctgagtgctgtaggagagggcttcagtgcacaaaggctgcttttcctttcttgaatgtggagctggacactttagggaaataacatcactttcaccactcataggaagttatgatgctaattctgtgacagccatgtctgccctttcctctgtccacaggttcctgccacattataaaacaaaagaactaaaccagcactgtgccagtcatttctatctaggggctacaattacattcattattcccaaattagattgtgtttacaattaatactaatctcatgtttcaatctttggctacctcagatttttattaaattagcagttgactgattgagataataggtctgagaactccatactggtaaagttttaatcatctcagccttttctctgatttcttatttatctgccacctgactttgtacttggggctcaccaaaataaagcgccaactgtctggggagtcctgcattatagctgttttaagatatgttcaaaatttttttactgctcttcccatcaagaggtgaggtctaggtccttccatctgaaaaaatatgagatctttgtgacattggcaaccagtagaatattgtggtagtgatgctgtgtgactcccaagcctgtgttataaaaggcaacatggcgtccacctgctggtacacttgctcttagagccctgagttgtcatttaagttatccaactgctctgaggctgctgtgcagtgaggaaacccaaactagcccacatggagagtccttgagaccacatgaagagagaaagatgtcagtccagcctttggctcccacagtcctccactgctccagtgccagccaccagttgactacaaccaaatgagagaccctaagccaaaccccctagccaagccattgcagaaggtctgacccatagaagccaaaagaaataataggatggtggttgctgtgttaaaccaccacgttttgtggtaatttgttgcatattgcaacaaatctaaccacaaagctaaccagaatttgcatgtatacaagcatgaggctaaagtaatgagattcatgacaaacatgccaaaatgtatacatacaaatgtatgccattcatttctttccataaggagtcaccttgagaggaacttactcataatcatattgtcactgtgatgttgtcattgtgatgctgtcattatctccccacattgatctctgactttgggcacattattctgtctctctgggttgcttgaaaagtaggcgtagattaaatttttacatagtcttttcttaatctctaaaaattcttgacaattattcaaaattctttggttgttgaggtaaccaaaggaggagataaccaaaggaggagcataagaagtatgctctggccgggtgtggtggctcacgcctttagtcccaacactttgggagaccaaggtgggtggatcacttgaggtcagcctggccaacatggtaagttcgagaccagcctggccaacatggtaaaaccctgtgtctactaaaaatacaaatattagcttggtgtgatggtgcatgcctgtaatcccagctactgaagaggctgaggcaggagaattgcttgaatccaggaagcagaggttgcagtgagccaagattgcaccactgcactgcagcctgggcaacagagcgagactttgtcttaaaaaaaaaaaaaaaaaaaagtatgctcctatcctacgttaccactttaatatgtaaactgatgtcacactcagtgtacatattaaaattatagtaaaactttaatggttgatgctggccatgtaggaaaaaaatgccctcttgttcatcatttaaaccctatatttatctgaaaataattttttaatataaagaaattattgaggctaggaaaataaaagaaagatatacctaggggagtcattctgttaaattccttgaaattatatctatctttttctttaagagtatttttatatgtgtaatgatataagctcatctttggaaagcacattaatgatctttacattttataaggacagggtaaatgggattccagaatatggattaataaatcatatactctttgtttaaatgttttatttaatttttgaatagctaatgtattcacataacttgaacatcaaaaaataaaagcagtgaaaagtttcctccccatattccctcccccatcttcatagtttctgtcactcttctagtaggtaaccactcttattaactgctagtttatccttccagagatgttttatgcatgtagctaaaacaaacctatattcttccctacatcggtagaggaattttttttaacactaatgttagtgtgcttttctgaattttatttttatgttgtaatgtgtcttgggtatctttccatatgcatacatgaaggccttctttgtctattttacagaagcctagcatttcatagtataaatgaaccatcgttttactaacattgtttagtctgtcccctatggttggacatttagctgtttcccatcttgccttattatatacaatgtttcagggaatgacctgtgtaaatactgttctgcatatgggcgagcatattatctttaggatatattcctaggaatagaactgctggatcaaaaggagtctacatttgtaattttgttagatatgattaaatcattttctctggagatagtgccaatttgcacttcgctgtataatcgtgtttgggaaacgtgaaccatgattgatgctcatttatctggacaaaaatgaattaaacttcttagaatctttagctcagttcctgatagacgtgtacagaaggagatgcacttgagagctgcaaaaaaaaatgttattctgatttattccttcttttgactttgaatactgaaggccaaagaggagagtgacttgcagaaggtcacgtagctgattagtgacagatctgggacttacaacctgtagtcagatcttaggattggtgttctttccacatgagtaaagagatggtaactttctgtcattcctgcctgtgtgctgaggactccttgtacactgctgctgttgatgatgacatttaccatttcttgagccttcctatgtatcagactttgaatttaatacttctatttacattatcttatttataccaagggattcaaaacccatgtgcaagataaagcattgtccatagactttgcatccatgtatattacatatatatgtccactatgaagatgctacagtgtttaataaaacataaatcaatacaaatcatcattaaaattataatagctgtttgtctctaacatgttctcaatggattttgaaactattgtgaaaaattagtcatattttgatattaaaaagaattcttatagtcaaaagcctatgagctgcttaaccatgtctcagatcacttttacctgcccagatattctattttccatccctctccattataaggttagatattaataatgctacacaacacagaagagaccacagagataatctaagcaggagatttattttataggtaaggaaaaaggcaagcaccactgaaaatgatgggtttatctaaggcacttgatgactaaggggctggagctggaattcaaagacaggcctcctgactgaatttaactactccacactgagaaaatgagaaactcagtgtggagtagttactcataagtactatggacaattaaaataatgaaggagatttcctgtctagcctcatattgattcacctccagctttgtggatctgagaggtcatcatgttggtcgataataacattcgatcttggatgctataaatttaatatagagcataaatacaaagatcaatattttaatgctgaggaggctcatttattggctgtttatcctcagtcctttaaatgaaatggagaactaaagaaatgcaaggaataatttttcataaatttcatttaagttttatagacgatgatgactaaaggaaagcaaaggaaaagtttatgatgtcactatttcctacacttatgggcttttctctctttctctttttctttctctcccttatccctccctcccttctccctccctctttcccttcctccctcgcccccgttaatatctctaagcctcttctttactttgctcaatgttttttattactccagataagaggcacttattcttgatcttctccatccacaaaataagagaaccatggtcatgtcccgttgttctttcatgtattaagtgtttgatgtttagaagcagtggggaaggggctaaaaagcatagactttgtcttcaacaatgggaacaagattgccaaaatggccctgaaacaacatttcccaaaggtgaaattgtggaaatctagtcctataaggtgttcttcaaagcacaggtttcaatcgtcaactgtatttaggaaacagagcattttatattctcctcctggagacgcacaactccttacggcattttaaatgcccactgaagtcttgcagtaaggtaactggtgtgatagaatttcacctgttttttttttttttttttttttttttcaaatttaattgacctttaaacccatatcataccgaacccatttggggaaatgctgctttatagaattgtgtgttattctggttcaatttttctgtcatttgtatccatcagaaaacttagaatatcatagttgggtataaataacaagtagccaccagaggggaaataaagtaaggctaagcaccatctccttcctttatggattctaacatttattaaagaaactaaagtacaatattcatataaatatttactatggtacaggacttgcattgcttgaatttatgcaactcttgcttgttacttttattacaaaaaaatgatatcactgtgtgctattttttttcctgagtacacctcaagcccatttatccttcacttctatattgtagtggttctcactttaaaagtaagtttacctgtgaaacaatatctgcgtgaacttattagtgaagttttgtatgcctcctttgatcacatgagatgagcccctcttaatatcggctgacaagggtttaaatactgtttcagaattaatcatggaaaccaatgctttaggtcttttctcaaacatcaaatagtatcaacatttagtgggcaaccaacagagatttttcttttcttttttccttctttctttttttttttttttttttgagatggagtctcactccgtcactaggttgtgaggtgcagcggtgcaatctcggctcactgcaagctccgactccctggttcaagcgattctcctgcctcagtctcccgagtagctgggactacaggcacacaccaccacgcctggctaatttttgtatttttagtagagatgggatttcatcatgttggccaggatggtctcgatttcctaacctcatgatccgcccacctcagcctcccaaagtgctgggattacaggcgtggtccactgcacctggcgagatttttcttttagtgacttatttgctgctattgaaatgccatatgcattttttaaactgtaccatattcttatttttgtatactcttattcttctgtcattcttgttggaattgagtggtaacgattagtcaacacaaataatttcgttataatactccaattacattagactgaatttgtctttgtgatgaaagttgattagttgttatgatttacaccaatgaaagggactaataattcagttcaccgataagactgggaagcaagacttacaaggcattttcaagtaaatttgattaaaacgtggggtttttcttctgctctttcttaaaatgaggacagtcccctttcactacattcctaaaattaaaagtttacgtgtgtgtagagattaaaagaatagcacaatggcttgttgtgtataaaaaatatcaagttttgtatttttcaacataaataggagttgaacagtatagattgcattaaaatgtttgaatgttttaataatacaataaaatagataattaactattaacctattaaaataggtatgaactattagcataccttatgtaggtgaggattggtaggctatacttcaaaattggcaggaatgttttgcaattattcttctcaaggttattaatgattattaaaaattctcttggtattttttttcagaaacttgctcttctttattgtgtacaatgcctgaaggttgtcttagaagtaagctaggctagcactggctcttcccgtgccaatccagatgttccttttgcaggcaattactcctcagtttatttccccagtttatttcccgccaaggatttgtctttttccagggagccaattatgcacgtcttatactataatctgtgtcacttgaatctgaccaaaaactatgaaacaattcacttgttggggattccttttcacaattatcattttcctgggaaattgcctactttaggaggttgtgctacttaagatcttctaccagagaaatatttgcgtcgccaatgtattgcttagcttgcttgtctccaggctctaacacaaatacctaaaataaataaagtattaattatgtaaaaaaagtgaaaaatacctcgcttatcctctttttccttccttttgtatttacagatgtcatccatactgtagggccaatagccaggggccatattaatggttcccacaaggaagaccttgcaaattgctataaatcatctctgaagctcgtgaaagaaaataacatccgatcagttgtaagtaattttatgttttttatttctcactctttttcaacctttatgctttagtaatctgtcttgtctaaagagaggtaggaaaccatttccaaacttttgagaactaagtttaaggatcttagtagccgatttggttatcatgactctaatctttgatgtgctataaatatttgctaaatttttcatgatgtttcagaatttaaaactataaaacctcagaactggatttatcttatctactttttcctctttattttgccacttactttcttttggagaaagtaaatattatggtagtggccagcagatttaaagaaggaaaatagcaagtgctgagtttgttatgatagcgcacatttaatatatattggttgtatgcttgtgcattctggagccatgtttaatctctatgtacatgcatgaatgtgtgcatgcattctcatgctagtgtcagacatgatttatctgcaggaaattactctgcgtatgtattttaacctgaatgttgttattcttttagatttattttactcttattaaactaatattctgtaggtggtagctgggtataccacagctcttctaagttttatcagtagacaaagggagttcagaaaatgtggatctaatctatttccttaccagtaggctgagatgaaaggaattctcttctagctggatttggaggtatttactcacctgcttttcttttgcaacatgttctacctttattacatctcaattacaccaagaaaatcaaactatagaaaaacacactgtaaatatctaataataagttaatttggctggaatcccttggttgttccccctcccccatatagattatagccttgctgaaattgtggggcagaaaaaatagttaaatgcttgatttcatagcagactgaatagatcagcattgcttgatagttcacagaggtagtggttttattatttgcatgaagaaattttgagaagcagatacatttaggtaaccctggatggttgttatgctttttgtgcatgattgtaattatgaagtgcatttttcaatgcaacattggtgattctgcttgaaataaggaaacttttcatgacctaattatatagccctttttaatctttggataattattaacagagctggatattttatttctctctttgattttctaaaattttgttcgcaaatggctcaatacataagatcctattctctcttagaggtgaaagctgaagttcaaagagaatggagcaaagtataccacaagaccagttggttaattttgttctctataggaaaataagaaaaatcaaaacaggtatgcacatttagggaataattaaaattttgtcaatatggcttattgatttaaaaaagcaaaagactgaagtgcttggaaaatggatatgtagagaagtttccaacttggaaaatatggattttgaggcctgaagagaatttgctagtggaatcactggcatctctaatgacttgtttttaaaagccaagaaaaagtaagaagtaagaagtttgttagaaacagtataaaaataacattcaaccttttaatagagaaaggaatctctaactgtaattatcttaaaacaatcgtgttactctatttgctaccattaggtaagcaatggaagaattatgggctaagttaactttttaacagatggcatgcagatgggctgaagtaatgctcctgtaatactctagtcattctttgataggaattagatctaccttaacatctttgatgattattttgaagggccaattacatattacttgaatgaaattagcaggtaaggctgaactgaattcatcccaatattagtaaataaaaatggagatagaaaatacacaaaatgtgggaagaaatgtccaacgaaattgatcatcatgttttgcatggtagactacagttgccatcaaatgtcttgtctcttttacacataaaaaagaaaaatatttttcttttctttctccctccttcccttccttcctttcttcctttcttcctttttttggagtaaatggggctctcttctttatatggtgtgtcatgttcttgatcaccattaaataaataataatgctaatctcatcacattctgattatgtagagggaaatagaaaactttcagaaacatgattatgactggatacatgttttatagtataggcttgtattttgtcaacttatcacaatagatggtagacatggttgatataaaaagcctggttattaggatgaaaaataaacttaacttgaactcatttatatacatgtcaaaaagaatttctcataaatccttttatcagagtggcttagtgtttgctttgccacttattactgtgtgactgtggacaagtaatgtcaacattttgtaactttggtttccacttataaagaatcagtaaattactactgttattgcagacctgtccaactcatgtggctgttgttatagggatcagtcgggataatgtgtataagataattggaggaatggaattctctgaaaagtatttgacaatgttacttcaaatataagatgttttcacacctcatgatttggcaatttaaggaaatatcacttatttctttgatatctattctgaacaccagaactctagacatttaccatgtaatttcttgatgtttttaaacaacagggaaatgtccaggaataaattaaatatttgataggcaccacttttctgctaaggttaaaccaaaggctttaggatcacagcacaggatccaacatatatattcttattcttattttaccaaaagaatagattcttcaaatatttttaatggatgtaagacaagtagtatgataatttatttaataaatatgaataagacctactgtgtaccctgacgttatcaggtaacttccgtgacaaagagaggatctagtggttgttttctaacaaaatgtgactccatcttatgaccacctagacaaataaatggacaagatcatcatgtccactgtgtgatttgagaatactctgtagttctcttatcacttttaaatatcttcccagagatgcatgaaattccataattaatgagtaatttaggatgttaaggcattgttctttctctgcaaatttcctttaaaatgcagatactcataagatcagtagataattaattttctaatacattaatatgaagaaatttatcaaattacttttcatgttgacaggataaattagagtatgataaaagtactgagcaccttagcctgggggaggagaattggagaaaggtctgaaaggagatggagaaaaacagaaaaaagagtagggtataaataaatttcacctacctctcagttttgctaagaggagatcattcttgaatagtagagagggaaatgttatagtcatacataattatttagaaataagatactgatttgggcgtaagatgtgttgtggataaaaatttttaccatgaaaaaatactatatattttattaacttaggggaaaaaattcattacatttctgttctccatgcattgtttgtaacagctgttttttcatacctatccacatttgctttaggtggtaaaggaaaaagataaattaatcaacaaatcaaatggctcattttacgatggcatttcttttatgaatgatgatttagtgcttaatatcaggaaatatttaaatgtaagattttaatcctgattctccttctaatcttaccgtaaatcgtttcaattgaaaaaatatgaccaatctttcatgcctcctagacctagtctgtgcaagtttatttcttccaaatattattccttattccaaatattaaagtcagttatttttatttaaccatgagttacccttggatccaaaaaatttatttttatatatatttatttatatatatatatatatatatatatattctttttttttttttttttttttttttttttttttttttgagacggagtctcgctctgtggcccaggtgggagtgcagtggcgcaatctcggctcactgcaagctccgcctcccaggttcacgccattctcctgcctcagcctcccgagtagctgggactacaggcgcccgctaccacgcccggctaatttttttgtatttttagtagagacggggtttcaccgtgttagccaggatggtctcgatctcctgacctcgtgatccgcccgcctcggcctcccaaagtgctgggattacaagcgtgagccaccgcgcccggcctatatatatatattcttgacaaccttgagattgttgattgcaagataggcaaaatttaaggcaccatgaagaggataattagcagtacaaactggaaattggagtgggaataaaagaaaactttaaaagaagaccagggagcctacagattttctctgtaaaaccttgggaaagacaaagatatagctgtcaaaaaagaaaaaagacccaggttgaatcccagaagtctaatgcatatgacctgaggaatgcatagtcagaccagtgaaatcaagcatctaaattatgttgatttctagaacaacagtatatcctgaaacaatgaaaactacacatatacatgatatccttggctatatatatctaaaacatactaacagaaatcgtgtatattggtgaaaatcttggtgaaatctcggggtgagcgtaggggtgaagacaagaaagaaaaatttctattgagccagggctggaaaatgaaaatgcctaattttgtatccaatatcaccacgcactgatggagaggatacatagatattttcttatatatcatgctgtctttattctttttgtttgtgagcacagaaatattttgtaatgatttttatgtgtttatcctgacttctgtttcccttcttttaacatcatgttcatttttaaaaaactaatccatgtcatacaaaaagtatcacagcaatttcttcttctagcaccagttaaaaggcatagatttatatttgtcaatcatattaggtatttgagaaaactattttcactgatgaaatacaatgcaccctgtctgacattctttgaatgacaacgtgtaatagagtagatgttttattttgaaaaaaacataatctgcatataagccagattttacttaggttaaaaattattttcccatgaaaataaatactaattgacataggaatttagtgattttatgtgattatgggcagactaaaacttgtatgtttgtttaagtggtgtatgctacctgtgatttccacaagcatcatgctagatgatttttttgaatgaaaaaacattgtaaatttttgttagtaggaaccacccaacttcaatagggatccctcagagctaactgatgttccttccttgagtcatagatcttgagaagcaagagcttccaatgggaaagatgatgggcctgcaaattcagtactacctctaggcattgtggcaatcaagcaattttggaattctgcatttagttgttccactgtagtgtaggttttcattttaaggcgtagtcaagtgaatcttattttcttatacaagttcccttctgagagggttgccatggcaatgagttctcagcctgaaattcttaaatgttggttttatttcattatctgagtttccattacaggccacatcaatcaatgcagttctctattcaagaacacgtctgcagccttaaaaagctgaccctttcatttggtacctctgctcctctgcctaacttgatgtcaccatttcccagacaactcttcatctccaagaaccctcttctacagggctgtcaatttgatcttttccagtttccttttaggcaatatctagtcttggttctcacctgtctcattttctcatttataaagggtaataccaagtctctatgtcttccctggttgggtttctaacagctgtgtgactaacaatactattaataagtaacaagaacaaaggcacttttgcatttgtgcatcactctacagtttacagcagtgtattcctatacatcatctcatttatttttcaaattctctaacttgctgccactgttactttgatttagccagtgtgggaaaaagctaactcaagacttttcctttcttcttttcccctacattcacgtttcgtaagatctcctcagagggcacagaggtacacaggttattgttactgggagtgacaagtgacaggacaggcagcagagtcgaggaggagggcgggcatggaatgatagtaaattcacaggctgtgccttggaaacagatagttatacaaccaaacccacattgacagatcctgcacaatttgtgtcttctggtggccacaccagagagatgatttgagttagaggggtgaatgagatcaatcattgagccatgaaatatagtaataagaatagcaaatgtttctgaactcccacttggtgccaggcactgtgttttagtcattaattctcaaaacaatcctgagttagaaaatgtgatttcttccatcttagagatgaggaatatgcaccagaaggaaactgccttccctgtggctcaattcctcatccaaggatatgagccaaaaccaaggtgatgcatatcgtgattctgtttctccactagctaagcattatgttgacgaccgtaactccatgcattctgtgggctattacactaacctgccatctgtaggttggacctgtaacactactggtcttagctcaagtgaattaaggtcttaccttgaacaaaaagttgaggtgggatttaaactgaggtagtctaaatctagtggcctaagccactgtgaagttcctttttctttcctccattattatgtgcctttttttgtctaaaccagtggttctcagtgggtgtagcactgccctctagggaccattttgtgagggtggttttgggcagtgacaacaactagggagtgccacaagcattttgtgggcagggacagggatgttgtgacatgtggtctggccaagcccacatgggaaaactgtccctcctcccacacaatgttttaacgttttgccagacagtcatataagtgaaaacctgtttataaacaccaagatacatcaaaacaaagcctctctctctttttcactgtatcctggactatcatgaaaattaaaggaagcttgtacttagtttgcttagaactttaccaagagtgcctgagaaaattatgctacagatggccatgcccaagcagcaggagagtttttcacacctggttgagtccacatttagagaattttttttgtagtgattctacgtagtgaagcaaacatcttccttcttcattgcgtgttctagtgtattcatgcccttgtctttacatgttgaaaatagaattttactataaatactttcattttaaatcattttcatatcacacttatggcactctattgattttttttaaattgatgtgttgttttcatttggcttcccttgggaacagaccctgagccaaggtgttgtgtgcacgtgctttctataggaggtgatgacagggaacagcgcagaggagtggggatgtgaggaagggaagaaaaagcagccaggaggagtgggagtgttataagttggcagtgtggacaagtggggctctgtcttgctggggagctctcagcaaccatgtagaacatgcctagaagtggtcccatctgagggaggagaaaagctggactattttttttttttatctttcccccttcatcagctggctgaggactgctcctgggtcattaacttcccagcatttcttatctgcccgcttgggcaggcagaaggaaaaagctcaggcagagagtgacagcaagggtatttgctagaagatgctgtggatgggcatgtgctagaatgatgagaactgggcagatatgggtggggcactgatgcctgtttcatgtgtgcagatgagtgttaatattgataaatgtcatttctgcatagcaaggggactttacaaaatatttgttataaaagggtttgctgagcctgatagaattgagagcattggtttaagttaaacagagtttctaatagagcaaagctacattgaatatgctaaacacaggttgctcaaagatttttattcttaaagttaggcatccaaattatctgcttctttaagcatagtgtgatatagatgtcataaaaatggtaattgatgtgactggccttatatcctatagaatacatggtcttatgaaagtgaatgtaatgcttagctaatagaaaaacaatatcacgtgttgtgtcaccttagttaaagttttttcaagatctcataatcctaacctttgattcatcatgcaaattacggaagagttggccacccaaggttgaatgcatgtaaagttgtccatcaatcagaagacacatattagaggtgagcaatttaagcaggagtctacctttgattttattctaatataaagtttctttcaaattatgtgttctttcaatgatttgggaaatatattgtcatatatttccttcaaaaatcttactttaggaccgtgatcaattctttttgtaagagtgtctgaaactttttgctttatttcatctacaatttgaaagaattatttttagtcacttgtatattctgcagatgtaagtctactagcaagaccaagaaaactatgtttaaaatgaaagtataaaacatctcaatttggctggatttgtcaacataattattttctgttcttttatcaggctagggaacattctcaggaaaatcattattggtttctacaacagtgtcttccagaggaaatactggcctagcacactgtcaaagagagtatattacagtgaaatttgtatagaaacagtaaagagatttgcaatgcaagctttcatcttgagtgctttatttttccctgacctgagcggcagttattagatcactgtatcatgaggaaatagtcaattgaagacacggaccacagagtcccaagcctgacattaggtttgaacaattgggcaattttggcatatatctagagggttaatagtatagagcaaaggcaatggctttaaaccaaacattttttcttgcaaatgttcagatttttttttttttttttggagagcaattgcaatgtatggaatctaagctattcttaaggtgttgaactcagaaaccaaaggagaaagaacaagtaaaaacaataaaaaatttaaaataaaaacaaatctgtcagtggaaagaaagctttcttgacttgtttatgtacaattcaatggagttgcaaagaggattttttttaatggaaaacatgtcacagattgggttcaagctgcactttagctatttttgtttgtttattttatacacacacaaacacatacccttcaaaactgtgcaaagtgaaatatttgctttcctggatgtcttatcaaagtggtatagtttgaatttataattatgaattaagttcagcagtatattaaacacctagatttcagcccatacgagtaactttagtgcagtctctccatctcttctgagcccatgttctgaaaatttccctgctcccagtatactagcaggtaagctatcccggaggatgcacaacagaaaagcttatagaccaaattaagaggcatgactcacattgactcaaggagaaagaagccaggagaaagaaagaaataggttaacacacttagactaggtgacaaatgtgtggaagaacctcattttctggttatgctgtgtttgaatgctctctttaccatctctaccctctcaatggtgatgtggttatgaggaccatagttgaggtttgaacaagggagcatggcagatggtgagtgcctggggcccactacacacacttgctctatcagaaagacaggggcaagtgggcctggccggtatctcatcagttcattggtgaacagcaggggggtttacctccatttctgtcagagaagatgtaaggccaaatgagactataatgagtatcaccaatgggaggataatttgaggataacattgctgtcactctagaggtgacatgattcatgcttctgacctgttcttaccattcttttccattttgaaatgacagtcttgtttgttccatcctttttatcatatagcatgtcttagaggttacttagtactgcatttaacacaattctatgaatcctgcctatatctcaaaatctgctcgcttagttattatcaacacttaacacgagttatatatcccatttgtttttattttcttctatagaagaattgaatattctcaaataatacagcaagcatattacactttttataagatgggatgacagctaggtgtggtggtgcacacctagagtcccagctactcaggaggctgagacagaaggatcatttgagcccacgagttagttatgatcgcaccactgcactacagcctcagtgacagagtgagacccagatacccagtctaaaaagaaaagaagaagaagaaaaaggaaaatgggataacatatatcagtaactaatcattttaactgggtgatgggcaggttctatgtatggactgaattgtgtcccatcaaaattcatacattaaatctctaacccccaatgtgatggtatatagagatgggacctttgggaggtgattagacttaaatgagttgataaggatggggccctgaagatggaattactgctgtgataataagagacaccagaggccttgcttcccctgactcttggcttctcaaggatacagctagaaggcagccttctgaaagacaggaagagagccctcacaggggaacagaattgtccagaaccttgttcttgttctttccaacctccagaactgtgagaaataataaattcctgttgtttaagcctcctggcctatggtattttgtatggcatccagagctgattaatgcagtgagtatgcaggcattcattatactattctctctgtttgtgtatgtttgaaattttccgtaacaaagcaaacttaaatgtttaaatatataaaagagaatgatagattataacagtatgtacttcctaggattattgtgaggctataaagaaggaatatttgtaaagttctcagtagattacatagcttattaaaaataatttacctgacagatatgttttaagcaactattatgtttcaatcactggtcaaagtacttgagatatagctgcccttgtggagcttacattctactgatagcagttttcattattgttaatagatggtttcacatcatttctagatgctgtgacattcattattattacattcttgggcaattatctcattaccattgcatttttttcttatttttgtgatttctgaatctttaaaaagctaagaaggtgatagaactgagtagagatccagcaagtggcaattctatgaaatagtaataatataaccctcagttaacatacatccatacaaacagacaactatgtaaccaggcctgtattactgaagatcatgttttattgggcagtatggtgaatcaatcaggacgctgtcttgcagaacaagtgaaacataccactacataaagtcttcaaaacaatgaaaatccagaaacagcttctcaagcatttgatgtttttcaatgtaaaaaaatagatatttagggtatttctctcaaaaaaaaaaaaaaaaaaaggaatagctcaaatctatgctaaatactttaaattccttgggctatttggctaccctagggaaacaaggactcatagaaattgtggtcagaagcatgaataaggaataggtgacatgttctgttgctcacaatagaaccaattctccattaggttcaggctttattttttttccttcaacaaaatgcaattagattctccaaggcatgtattaaatatgaaagaacagacactgactttgtagtggagaaacccagcagataccaccataatcaagtgatcaagattaagataatcagtaatgagatatgtcaacattatgaacctcttggtataatggatcaagaaagacactacatcactgctatggtattcttgccatagccacagtccagtcataaccatagtctaatcatgagaaactataggcggacctccaaagagggacattcaacaaaataggtaattaatactcttcacaactgtcaaaatcataaaagaaaatgaaaagctaggtttattcttctcatattgttatggcatattacattaattgtttttcaagtgttaaaccagccatacattcctgagataaatcccatttagttgtgtcatgtaattcataatcatttttatatgctgttggattattttttatataataagtgtttgagaatttctgcatctatattcataagagatactggtcttcagtttgcctttattgtgatgtctttgtttttggtgttatagaataacttcagaagtgttatctcttcttctattttttgagagagtttgtgaagcattggtattctttaaatgtttaggagtagatttaataatttttaagctatcgtaagaaaacatttatttagttcatatttgtggtatctaataaatgaccaagaaacaggatctagtagtatatttttaaaaatgtaaaaattagaaattcatagcacatgcattttggtttttaaattaaaaatatttgcttacaggttttattatttcacagctactttgccaagttttcaggttgtctttctcaggaaccactctgggatggaggttaatgtgcaggacgctaatatggaaatgtttttgcaatcaatatctgcagaagggaagaaggaaacagaattgggcagagggagaagtcacgtgatgatgcaatgtttatggagcatctggtgaccctactgggagctctaaagctgagatgattgtttcaaaatggttccaagttggtgtgaggagtctagacctgtacattctgagacaaccagttattaatgcaggctgcacccaggaacgaatgtgatcttggaataagtagctcctctcagtcaagggtaatttctggagagggctgacagctgagggctgtcttctggcaacatcccttgaagctggggcactgtcctgcacagagtctgggtggtgcatcacagcacgaactgggattcttaaactgagcatgatcctgctccaatgcccaatgtatttgacagttatgtattctctcttggatatggtttaaaatttaacagctctaggaaaataagaactgaggcaaaataccttgcttcaagtgatgaaaagggtaataggctgagtattctgtatttactggtcagagcagagtcattttgatctacatgcacacagtagaatcgaaggaaacagtcctcatttttcttggttatctggctcatttgcaggaataacacacacacatacacacacacacaggtcaatatatgtggatcttaaataaatatgcagtggggccaacttgtagtggtttatgagaactgattgttaaaatgtcaagaattctgtgagctggccgggcacggtggctcacgcctgtaatcccagcactttgggaggccgaggcgggcaaatcacgaggtcaggagatcgagaccatcctggctaacacggtgaaaccctgtctctactaaaaatacaaaaaaaaaaaagaaaattagcggggcgtagtggcgggtgcctgtagtcccagctactggggaggctgaggcaggagaatggcgtgaatctgggagatggagcttgcagtgagccaagattacgccactgcactccagcctgggcgacagagcgagactccatctcaaaaacaaaaaaaagaaagaaaattttgtgagctgattattaaaacacaggctttattaaaaattaaattttataaactcacaatttaataagttatattaaatatgaagataataagtactcaatacacagcaattcctaattactatattttactattacctatgccctttggtttatttatgtctattatatttatatggtggaaatagtatataatggtgaatttctttgcatcctttccaattctatgttcagtgacatcatatagatagtataaaattttccatgttggggctatttacatggcagaaaccaacaaatgctaaaaatcagggcttgatgtactattttgctggttaatgagacttaagaaatcttgtcagtgctataaatattagagaaaaagtacactagccatagtaaggtgatcatattattactcatctaatagcaacaccaaagcaaaatctgctaatttcatgcataagtgatggtttttgtacctggacagcagggataccaggggaaggctgtcagctgcctagtttgggtctggagacatggaagactttgaggtggggagtgccagttggtttgaggcccccctgcaccccagattgctgttttttatggttgaataggcagacacttctttccctctcactactgcaagtgtatcattccagaaggtatggtttggccaaaaggcatagtattcctaaagaaaggagttccaatagcttttctctgctaaaagatctcagggtctgattttattttgatattaagaattttacctaactaaaccctagtacaacatttttttaaattatgggtaattaaaaacttccatattttaaacagtagtaaaggcacactctgcaaacatttctgtctgcattacctaaaatttaatggatcaggcaaatgatacaaattaggcacacatttgccaatatttttaattagcctactggtttacctgcatacatttgttactgtaagttattacttataagagttacttcaaattcaagatcagcagaactctccataaaattatatacctgtggcactatcaccaaaatataacatcatagacttgtcataaataattcagagatttgttgtaaccattcaacatggtagtgttaatgtgagacatggagaattagcatttgaaatggataattccatatttatttcatgccttcatttattttacacatttaactgctttggtttaaatggaaggagaatcctttctcaaaattcaatctcagctgtcttcttttcaggttaatggttgatttctttcaaattacaaatcttggttcaacataaggatgatgacatattgcagaaatacctttctattgcttgaaatgagaaaatgtatttacttattttctgtgacaagtgagggggatgctgttatggcactcaaaatgtatttatggtatttctattagaaaaaaaatctcaggaactaattatgaggcaaggcactggcaattctattgttgtattcaaataactgtgtggcaacttttccaattttgacaaatttggcttaaataataattcaatgatgcccctcaagtttcaaatacagacagtcccttacttatgattttttagttttatgatggtgagaaagttatatgcattcaatggaaactgtacttcaagtgtccatgcaaccattctgtttttcactctcagtacagtattcaataaattacatgatatatttcacactaaattataagctagactttgtgttgaatgattttgctcgacggttgtctaatgtaagtgttctgagcacatttaagatagagtaggctaagctatgatgcttgataggttatgtgtattaaatgcattttcaacttaccatgggtttatcgggatgtagttttatcataagttgaggaacatccagatttgcacttttctaacagcctatgttgtgagcaaatttaaagacactgtgctttcagacaaattaagaagcatttttaggaactggatacttcagctttagataatagtgtgcatctttctaaaataactcatatgcaatggcatgagtagacatgtccagatgtaacgaaccataggctagaatcatgtcctaaaacaatctaaagaactacagacacatatgcctttaatgctaataaatcgtcttatctcagtgtcaaagctattactacaatttaagtttaacctctttggaaactttctgttagtatattggtattttggtgagtatatcattaaaccattaacatagtgaatagggtgctcatacatgaatgtaaatgtgagtgtatgtgtatgtgtgtgtgtgtctgtgtgtgtgcactgtgtatccacatcacttcctttccctgagttaccaaacctgagttttttaggggccagcaatccatgcctttacaacactctgatgttgatgtggttttataatatctttgtggtatcacagaaagaaagttgacctagaaatctgaaaactaatatttgagttttggcctttctaattaattgctgtgtaagcccatctttttatttttttttattagtgaaatgaggaaaacaagatcttcccttaatcaaatcaatgggaaataacaagggttaatgaggatattaaaaatttgaaactcttaaccactgcagtggatgcgtaagatgatatagttgtggaaaacagcttggcacttcctcaaaaagttaaacacagaattatcttatgatcaaacaattccacttctaggtgtttacccaaataattgagaatataggtctgcatataaacttatacactaatgttcatagcagcattattattaatagcaatagccctaaagtggaaacaatccaaatgtccaccacctgatgaatagataaacaaactatgatccatttgcaataaaaaagaatgaagtactgacacatggtacaacatggatgaatcttgaaaatgttatgccaactgaaataaaccagtcacaagaggcctgattccatttatctgcataggaaatccgtagatacagagagtagattaacggttgtcagaggctggggataagagatgggaatcagggaatggggtgtgactgctaatagggtatcttttttgaggtgatggaaatgatctggaattaaatagtgatgatgattgcataactgtgaatatactaagaacactgatttgcacactgttaaatggcaaattttatggtatttgaattatattacaatttaaaatttaaaaaccttgtcctgtttatcctggaggattgttgtaggaatgaaatagaagtggaaagttctataggctctaaatcatattcaggaatccatgccattgcatggtgaagcacgtaggcctcagtgtacgcaacttgataaagagagtttgcatgaaaagtcatctttatgttgggtaattgggggtgtcacatggagggttatcactcagaatgcttgctgtgaagagctttatagaagagttatataaattacacacaaaaaagtatttttttaaatggaaagcacaagagagatggagataaatcgaactttctgttgggacctgccactttctgctttacatgttaatagtgactgtataataactgtcttcctaggctgcgaaaccctgaaggatggaagcttcgtgtggttcatctccattactctgcagcaccctgcgtatagagagtgcacagttagtaataaatgagctttgacagatttttttttttttgagactgagtctcactctgtcgcccaggctagaatgcagtgacacaatctcagctcactgcaacctccacctcccaggttcaagcgattcttgtgcctcagcctcccaagtagctgggattacagacaagcaccagtaggcctggctaatttttgtatttttagtagagacggggtttcaccctgttggccaggctgctcttcaattcccaacctcaggtgatctgcctgtcttggcttcccaaagtgctgggattacaggcatgagccaccgcacccagccagacttttctttttaaacaatatcctgtttggaattctaagcaaagtcagcaggctactgaatggacttcaagcaccaccctctgggacttcacaggctgctcctctcttgtttaaatgtggaaggatggaagctcaccccaggactctaggcaaagccagaacttgaggtcagcgcatctcacactgcctctaggccaccagggcatgtcttttccaaactctcttagggctgctctctgtgactttcctggtgtgatcctcaagccgtcctccctgcatctgtctgtgtttatctcacttgagctcactgcagtacttgacacttgtggccattcctttaggatgcttgcctctcagcttccaggacaccactctcctctctttcctccttcctacttggctgtttcttctcaattgtctttgtggccacctctggcttaaaccctctgtgactcctttgttcaccctttgctcttcttgcacagcagtatatctttacttaccagtaccagtcaaaccctaacactggtggtataggggcttcagtgactacaagtccctgattcccaaatcatggctcggctaagacctctgtcttgatctccattactgaatatccaactacctggtggaaaattccattgcatgccccagagtccgctcagtctcagtgtatctcaggcaacctgcttggactcctgtaactaatgccattgtgaatgtcactgacatgagtcttatgcagtcagaaatccaggagctgttctaggtctctctgcctcacccctctccttccagccagtcatctcttgcagtcctgtagacaccccctcccccacaagaactctcatatcctttgtcttagtttctgttctctctgaagcaaaccctgagaatgagacaagtacttggttacaaggaatttattgggtagttcatttttcccaggaagctccatgagggagtagggaagtgagacagggaagaagcaaaaccaataaagagtgtgttaacaaccaggtgattgctaatggcaactggggcacagtttagctggggagcttctgagaaggcacgtggaagctgcttcagaattgccccgccaaaggacaaggacgctgaggtatttgtctaccaacccctgtcgcctccttgttcgagatctccctcttgcatagctagcaccttgagtcagtgatcaccctcaggcagtctcaggaggttatctgtggctatgggagtagtctgcaggggaacgctgcaaagaccaggagcagggtgacagcccaagagcttctgtggtactgtcttctctactctctcccagccaccattttctgtcacttctcagctgaaccactgcactggtctccttgagactttaaggtttttaaaatttctttgtaactttttgcacatcctgccagaaagattcacacacacacaactgaccatagcatacactccttccctctgattagagatcttagaggctcctcagagttttcaggatgaagcctgattaccttagcatgtgcttcccaatactccaaggcacccaaggctccatagcaattgcatgggggttggacaggatactgtaacatttgaaaaaaatgcagttctttaacatttgttgggcatcctggtaactattagtttaaaggcagtctacagtttcaaaattagatcatgcaacgttccttttcttgatgctacgttatttccaagttgagttcatgactattgctgtgattaaaaagcatatgcagaatgacaatccatgtggaaaaggaaacatgggcggcaggggccgagctggttcaaaggtttgaggatttgcacagcgccaacaggaccaccatcccattaccaaataattgtggttatttaagagtgaaatgtaggtattatttttccctttatatgtatgacttttaaaaataggtactgagctgttagtattaaacccttactacgttgtttagacttatctacttaagaaaagaaacttttaaggcatttctttacctaaggccctggccaccctcttgtgtctcctctgctgccactcttaaatacaaatttttggctacctggaaggtccaggaaggtcatcatgcctttgtttgtgatagcacagactattccatctgtcaagattaccttcctcacctccccaccaccttcaccagccctacaccacacagcttaaggtgcacttctgctaggatgagtctctgattagtgttttttgccccaggtattattttgttgcctctgtgtctgcacagccttttgtacacagcttttatgtggcaatattcttactatacccccactggtgatgtacttgtctatctgccacattgttccacgatttccatgaactccatgggcacagacgttgcattcgctttgactttgctggcattttttattgggattatgtccatttagcttatgataaattagcatgagtgcctaagatgggatatagattcttgaaaaaaggtgaacatataagtcaaaggattgagaaaaatgtaagaatgtatgtgaaataataagcctttactctttttcttcttgtttatcatttcaacattttatgttgtgattttctgtgtatatgccacaggacctttgcatatgccatcctctgtgtttagggggatcttccttctcccttcacctgagttacctgcctcccttcttatcctttggatctcagctctgtcttctcttccttgggaaaaagttttacatttatatttgtatgcttatttgaatatttttcttcttcctccccagttcatgagctccatgagggtagggacaaggtctgccctgctaattattggatccataattgagtatattgcctaacatgtagcaggcattcagtaaatgtttgtagaatgaatgtagaatgaataaatgaatgttgaatctatgaaagcttcatgtttgcatcaagacctgatgactattctgaagcagtgggatgtagtttttccaagagagagtaggaatgttgtctacattgtgagaacagaaaggatttaggcaagggccagcagggaatggaattttagttccaagcttgaaagaaattgggaatcattttaggtttccgaaaaaaggggtaggggtcagatgatcaaaattgggctgaatgcaacacagaaagttctgtttatttaaccacttgcaatatttcacttcaaaatggattccctgccactgagaagctgccatgttttcatttgctggaacgtggtgaagttagataaatgataatgccatgtctttgttcattcctcagttagaaagcctcagccttaaatgctccccagtgcaaattctcactgaataaacatggagtgtattgttttacaacatgctgctcaatgacattgcagcacatttggcactgctgagcatttcaggatgaggaggcagaaaataacaacagcaaaaagcccataaaacaaattgcatcccctatattccttaatgaaggacttgggtgtaagttgcatcaacgtcagagaatactcattcattgcaaaggtttgggaaaatcatatttatgcataatctccttgttctcaatgatattttattaatatttatttcccttttgcctttcatctggtgttatcttcttttctttttcatctttattttccaagtgactagctgaaaagaaaaacagtgaatcggtgctaagttgctattttttcaattttaagggactgattcttaatcaagttactattttaaatgtttaaattgagaaagttccgggtaacaacctaaaaaatgtaaatacataccacacagttaattaatgtttctgaattgctactgtttgaagttgataagccccatgtatgaattcctcagctcaaagctgagggagttatattaagaagacagtagaaaataaaaataattagctagtgttttgtaaggagggaacataaatggtatctgtgtggctctaactttatcaattcagtctgttgatttcaaaattcagtcatttgagatatttggtattatgcagattttaggcagcatgtgaacaaagggctaaggtaaggattattgtattgcatgtatttctgtgaactaattttgaggagctatactaggcttctgttttatgtgtatctataagcattttacaaaacaattccatatgtattgctaattaaataaattcatctcaaagtttgttacaaactcaatcaagtgtttgagatgtagaaggaacatatagtttaatcctgtaccagtcaggatagcctaagtcatgctgaagtggcaagtgatctcaacatttctgcagcttacagccacaaagattgagttcttactcaggctagatgtccatagaggcagctccagctccactacacatcaccttcactctgggactggctgacagagctgtctctctctggaactgttgcttgtcacaacagtgagagagagaaggcggttcttaaagctacatatggcttactgtcacatttcattaactagaagaagtcattcggccatacctacattgaacaggacagggagacaaagagggataatcctccctcaggaaaaaggtatcaaatacttgtgattagtctaccactcactccttcatattttggatatgaaaaacatcaccagaaggattaagaaacttggccaagatcacttgcaaagctgggattggaccacattcctgtgacccaattgcagacattcctgtgactacatccagtgtctccttgtatgcaaatttgtggacacaccatggcatccacagactcaccagagaaggatgccacctacagagccagctgctcaccagagcctggcttgcatcatggcatcactttgatggggtcagcatattcgccccttgactctgtaggtccaaaatttgcatctgttaatgtatgctgtatcagtcaggattcagtcatggaggtagaaccgtatacattttggtgcaaggaatttattataggaattagtacttaaaccatgtgggaggaactaggaaaatgaagaaacaagggaggagttgaaggccaaaccagctactttgataagccaagtgtgttcagtcatcaaaataggcaggaaagggaaggtttttgggagtccagtgggatgttgggcttcggtgtggctaccactgctgtaggaccaccactaaccatttaggtaatgcctatggctgcttttgcactatgacagcaaaattgcatagttgtaattaagactcaatgacccacaagcctatgatatttactatctggccttttacaaagtttcctgacccctggtctatagttcagaagattgatttgctgatctatagtaagaaactcagctatgcagcaggtccagcaactacacagttccaagataagatatcatttccccattgttaaatctatgtgcaaagctaacttatgattaaattatggtaagcttaactgtaatacaaggaatcatttcatactatttgtaaagcagtgaacactagcgtaataagttatgatcgtggaggctaccacctgcaccatccataccccgagggctggacactcataactatgggtgaggccattccttccgctggggcaagaataactatagatgcctatgggaaactgatacaatctcattctctacacttcctttatatgctgaaggtcacaatctttattcttgcttagtgaagagagaatcgactgagctacatccacacactattcaccataatgagaattggaatattacttcaaattctgcagtcaccgaagcaaaatctgtaacagggtggatttcaaaaattattttttatcaaggcataacctcatttattttaggttcatggatgtaattttattctccaaggtaaccttatcttcaaattttataggtctcatgctgtcccccatcctgtatcacctacaggtgacttttccttgatatgacttatagaacattaacagtgctttcttttcaatcatactccgatttggttagttccaacttaggggacacttactttaaaatgtctcttcaccctgcaggaaacgagtttattagtgaaactttcaacggatatttttattccatttatgccatttatctctccatgccttgtgaggcaaaggagtggtgtttcaccaggttaagaggtaattgatcaagattcagttcaaaaaaagtgtaaacagtacagatcttaactctcttcagtacttttaatcaaaaaggaaaatcaaagcgtatcagccagaatcatcaataactcttggtggatgttcaaatgcagtgacctcttgacacttccactgccttcagtttttgtttttatcatttgttgcttagcagcacggggggaaagagcaggactgtagcttggatttaagctcctcatttactagctgtgcccttttatcaaatcgtttaatactgggagccccacttttctcatctgtagactggggatattaatggctcctatctcaagcagttttaagagttaggtaagttgatattgaactaatttgacattaatgttaaatacttatcatagtacctgagtatacctgagggcatatccttcattcatctaacaaacaaggtgctaaagacactattataattatcacagtagttctatgaggttgctatgattatcttttttgtttgtcttttaacaaagaaacagagaatcagagcagttaaatgacttccttggtcataatcctagagaattttagagctagagatagaattcagatctatctgactacaaagcccaagcttgtggacttaccctccatttgtcaaacgtgaattccttgaattgtaaaccatttggggccaaagcacacctttttttttttttttttttttttttcagttaagaagctggtaattgagtgaacacaatatagtggtacttcagttaactggagctcctggggatacatcattctggacagcctagcattccagaaagctttgggtatttgccaaaactttaaaaatgttgtttaatttagatagaaccctccataaaatatatatttctctatcttcttaaacagattatattgaacctgatttaagattacattaactcagtcatttatcatcgtgaacttcatttttatcctgtactctctaatgtaagaagattctgaggttttattgaaataaagagggatatcattgacctagtctgttatgcatttttaagttcctgtgtttgatttgtaaagtttaggtgcttcctgtccaagcacttgccacttctctttgcctatttgaattgtcagtctcccacaagaccacctgaaaactctgttgacgaagcaaaactaggtttattaaacctatggtacaattggcaatcatcactttgacagtcttggcagtatttcaaaatgagggaattaggttgacatttacatggtagggtatgaactgggtggttttaaggtgagtctcacaagataggaaattgtctgggattgggtagagttgataacataagagctctggagggcacagtgaggtgaaagatttaaagcaagtgttgatgatcaagtcattggtagtaataagcaagctctttcagttgggtcacagttatattttacaagagcacgtatttctttgagtaagaagctcagttatttttgcctagttccaatattaaaataggcaggtatgtctgatcccaggattgtatggtataaggacaagaaagcatattgatttggtctctcacttgactctatgtcttggtgcttctacatgctatggcatgggacactcaaaactggaactgtatggcaacagagatccagtaaaagctaagtgggagcccaggaaactgacttacacacatgagttttgtgcttgggcttgtgacatccatttttaaaatgcagagactcctttttttcactcctttttttcttgcttaatccctggatatctttctaatgtcacgtagccaacaccatcaactaggtgagcatcagttaggtatctatttctgcactgggaatcttgaatttataaatcctggtcaaaagcgagttaaagagatttttaaacaattacacaaagtaattcttgtgttttatttattcagtttatattgagttttttgcagctcttactctcctcttcttttgtgtttgaaaatttaaaaagtgatgctgtttggacacgagatttgttttgtaaacatgaaatttagaatgtctggggattctattaacactttttgaaaagatattgccttgttctagagttcttgagctattatataattgaagtaaatagcctgagaacatagggatttggtgtggaatacatggaagataaagtgatcaagcaagtttaaaatatacaattagtacctaaaataaagtgagtattgttttacatcttcaatctagtagtcggcaaataataaaaaaaggtcaaaagtcccaattatatagtaactatcgaactggaaaaagaaatgaatttgactcttactacttaaaacttttagctgtttatagtaatttaaaccaattgaaaataaatgttccagccagcaaaaatcctttctaagaactatgtgtggtaagaggatacaataaactaatcaaacaaagtttctgaagtctcattaaccacggaatttttagtgaaatggcatggatatggtatacttggatttatttggaaatgacagaaatttcctaacaatatttgaagcctgttttggtgagtgctatcaagggctgtttttctttttcttttttctagttatatattcagtactataaattgttggcagctggcccagaaaaagagcctattttcggaaaaaaaaattattctgcaactttatgctataacttaaacacactaaaaagtgtgtttaaattttattgtcagattaccagcttttatgcaggtagactccgtggaaaccataggacaatgacaaagttgcttcttttctttctcttagctatttttttactctggattacggtgtggatattaatatatatactttttatcaagtatagggaacaaaaagaaaacctgcctgcacatgtaatctttcttacaatatacatacctgtgaaacaccagatgagaaaagctatgatctgatttatgtcatgcgaaatgaatgttaataaatcctatttagtcacacagatgccaaactgagacaaatggaagcctctgggggcaagtggaggtgggcaaatgggctccactgatttatgagtgcagagtcatgaaattgaattcggcaacctacaaatgacacttattgagaacctatcaagtgctaggcacccatgctggtactttgaatacagaaataaaaggtttggattgtaaaaatgtcacagtataattgacaaataaaacaagttaattaaacaatatggtaagcaatagaagtgcaccctgcataacaatgttttggttaatattgatggtcccatgggatcataatgaagctgaaaaatttctatcttcttaaggttgtaacacaatgcatgagtcatgtgtttttggtgatgctggtgtaagcaaaccattctgtgctgtcagtcacacatttatgtacagcacatatatatgtatagcacacaatacttaagataataaactatattattgttttacgaatttgctatacttcttatcactactttagagtatactttttctacttataaaaaaatacaagttaaatgtaaaacagtctcaggcagttccttctggaggtattccagaagaaggcactgttatcacaggagatgacagctccctgcgtgttattgcccctgaagacctcccagtgggacaagatgtggaggaggaagacagtgatattgatgatcctgacttctgtgtaggcctaggctaatgtgtgagtttgtgtcttggtttttaacaaaaagttcaaaagtttaaaaaaaaaggtaaaaatacaaaaaaagtttatagaacacatatatatagaaaaagtattttttgtacaacatacaatgtctttgtgttttaagctattatttccaaaaagtcaaaacgtttaaacaaattttgattttataaatttaaaaatttatacattaaggttactttattattgaagaaaaactttttaaaaataaatttagtgtagcctaagtgtacagtgtttataaagtctacagtagggtactgtaatgtgtgaggccttcacactcactcaccactcactcactcactcctgaaggcagcttctagtcctgaaagctcccttcatggcaagtgccctacacaggtgtaccctttaaagaaatcttttataccatacttttactgtatcttttctatgtttagatatgtttagatacacaaataccattgtgttacaattgtctgcagtattcaggaaagtaacatgctgttcacatttgtagcctaggagcaatagactttaccatacagcctaggtatgtagtaggctacaccatctaggtttgtgtaagtccctctgttgatgttcacacgatggtgaaatcacctagcaaagcatttctgagaacatatccccatcattaaccaatgcatgatgacaggtaaaaaggttgattactgccaaatagtacttttgaaaaagttaaaactaggactttcacacaaatatgaaatgaatatatgtcaaagattttgttaaacctattgataaatgagagaaccagtaaagtgatagaaccagttcaaggaacgtttgcagagctagatattcataggcaagttaataaaggaaaattaagataagattgctaagttagagataaaagcagctaatttcctacaggacaagagagcataacttttggaattatcatttcttctagatataaataattattttagtctctgttgaataaaagtctacaaatgtagacatgtaacctcactaaatctggactcttttatcaatagtaattggtaggttggacaaagctcatctccatagaaattcaaggatgcttctttccccccatacaacattctgctgcttatcttttgccttattttcaagttttgggtaattttttaacaacaacaacaacaacaaaatttaggagcaatagcatatgagacagaggaaaaacagtgggattccaggcttcctcactgggctttgttaagcagaaagttaaggagagaagacacctgagataggccttctacaaatgagaaaatttccaataggacaaaatgtggggggagctggcataggtagaaggaaggcaaaaacaggtaaatcccaagaaccatttgacaggcaatgttgtatttacttttgtaacagatatagcactgtgactgggggccagtttatgagagacattactttatactttgctgcatttgttgtggtgatggtttttttaagttagaaaatcagatcatctgcatactgaagagcagttatgagtcagttgtttttaaagccatacatttatatgttagagaatttaaactctttcagaggaaaatgcaaaagcaatgaatgtagaaggcagtgaagacagagatgattttaatgcacccaggtattaaaactgagcagagcctctaattattcaacattattctgaaattctctttcatcacaccataggcttttttttccctcttcttttctatttcacctccatttcttttctctctggccccagatatgaaatgaaatctgggagcaaccacaatttctgtctcactggctgagcaggatgcttctgaaagaagcagcatctatatatagtttttcttcttaggctgcaggtgtgggatggaatagaatgaaatggaacagaatggagcaaaaaggaatggaatgttatctctcctgaaattttttttatttaaattatggatgcataatagttgtacatatgtatgtggtacatgttatattttcatataggcatacaatgtataatgatcaaataaaggtaattgggatatccaattaccttcagcaatagtttttttgtgtgttaggaacattccaatggcactcttttagttattttaaagtatacaaataatgattgttaatcatagttgccctattgtgatactcaatactagatcttatttattctaactgtacttttgtgcccattaaccattccctctttatcccccctccccacttcctttcatagcttctggtaaccatcattttactttctatctccatgagatcatttttttttttttagctcccacatataagtgagaccatgcaatgtttttctttctttgcctgacttatttcacttaatagaatgtcctccagttttgtccacattgttgcaaatgacagtaattatttttaatggcttaatagtattctgttgtgtgtatgtaccatttttctttattcaactgttaaaagacacttaggttgattgcatatcatggctgcagtaaatatgggagtgcaaatatctctctgatacactggtatcctttcctttgattatatacccagtagtgggattgttgggtcatatggtagttctgtttttagttcttgaaggaacctccacactgttctccatagtggctgtaccagcttacattccctcacaacattgtatgaaggctcctcccctctctccaaatctgtgctagcatttgttattgcctgtcttttgaattaatctctttctgctgttaataatgtaataatgtatttacttagctccatttttctctttgatattaatttccattttgcaaaagaagtcacattaagaaatgtttattaatttaaaatctctttactaattgggctttgccagtaggtaataaactatgggccatgaggttattcaatcttgcagtattttttccaggaaggtggtaaaatatgaccatagaacaaactattggccttgctatatgagctgctgtgattagacatttccaagcccagcttaaggcaacatctaaccagaagagctctaaatataaaataaatgaggtgctgctctagtaatccatttatacacagcatttattttagccattttttttcatttgactgttggcagtcgatcattggatttatacggtttggcattgatcttggagaaggccagtttggtgcccacgtcaaacatgcccaatattctattgtccatgtgactccctagaattaattagaaaacatttcaaaagggccactctaggatttaatactatcaataatagttgtttaacccaaaatatgatgaatctttgctttatttatttctaattgggcagttttgcattttgccgagtaggattaataagcaggttaagtctaattggcttgctttgactgaagggctgaatcatttcaatatagaaacctgtactttttataatttgaaaaaaatccacccaaatcaatcctgaacaatttttattttactttctcaatttttctttttaggtcatttaaacatcttgggtccttttacatgaacagcaagactgatgctttttgaagaaaagtctgtcttcagatagaaaaggcttctgtttgtatagaacaattagctaaaattagcatgtaaatttgaacaatattatattgtgaagctgattgggcctggaggttgggatgcaagtaacttctcttgtttattgtatgcaaatatagccacttagctttaattggacattgaaacccagaacaattatcaacaattgctttagtattaatgcacagtgggaactgcctatcatgactttttatttttttcttaacatttaatttttaatttttgtgggtacatggtaggtgtatatttttagaaagtacatgagatatttttgaaacaggcatacaatgtataatactcacatcaggttaaatggggtatttatcacctcaagcatttatcctttctgtgttacaaacaatccaattatactcttagttatttaaaaatgtataataaataattgttaactgtagtcactctgttatgctatcaaatactagatcttatttcttctatgtaactatatttttgtacccattaaccatccacacttcccccttacacctacccttcctagcctctggtaaccatcattctactctatctgcatgagttcaattattttaatttttagctcccacaaataagtgagaacatgtaaagcttgtctttctgtgcctggcttatttcacttaacacaatgaccttcagttccatccatggtgttgtaaatgacaggatctcattatttttatggctaaatagtactccattgcgtatatgtaccatgttttatttattcattcacctgttgatggacacttaggttgcttccacatcttggctattgtgaatagtgctgcaataaatatggaagtgcagatatccttttgatatactgatttcctttctttgaatgtatacctagctgtgggattgctggattgcatagtagttctatttttagttttctgagaaacctccaaactgttctccatagtggttatactaatttgcattcccaccaacagtgtacaaggactcccttttctccacatcctttccagcattttgttattgcctgacttttagataaaagcaattttaactgggataagataatatctcattgtagttttgatttgcatttctctgatgatcagtgatattgaacacattttcatttacctgtttgccatttgtatgtcttcttttgagaaatgtctcaaaaccttttggccagattattagttttatttttctctatagtgttgtttgagctccttatatattctggttatcaaccctttgtcagatggatagcttgcaaatattctctccgattctgtgggttgtttcttcactttgttgcttgtttcctttgttgtacagaagctttttaatttgatgtgcttctatttgtgcatttttgctttggttgtctgtgcttgtggggtattactgaaggaatctttgcccagaccaatgtcctggagagtatccccattgttttcttttagtagtttcatagtttgaggtctcagatttaagtctttaactcattttgatttgatttttgtttacggtgagagataagggtctggtttaatttttctctatatagatattcagttttcctaggatttttttttctctttctgcaatgtttgttcttggcacctttgtaaaaattgagttcactatagatgtatagatttgtttttggttctctattttgttttgttggtctatgtgcctgtttttatgccagtaccacactgttttggttactatagctctgtagcataatttgaagtcaagtaacatgattcccctagttttgttctttttggtcagaataattttggtgattctgggtcttttttggttctatataatttttaggattttttatctatttctgtgaaaaacgtcattggcattttttatagggattgcattgaatctgtatctcgctttgggtaatatggatattttaacaatattgattcttccaatccatgaacgtggaatatcttgccctttttgtgtgtgtcctcttcaattttctgcatcaatactttatactgctcattgtagagatctttcacttctttggctaagttagttcctaggtattttattttactcatggctattaaaaatgctattactttcttgatttcttttttggattgttcactgttggtgtctagaaatgctactgattttgtgtgttgattttgtatcctgaaattttactgaatttgtttatcagttctaatagtttttttggtggaatctttagttttttccaaatataagataatattacctgcaaacaggataatttgacttcctttccaatttgaatgccccatcaggactttttaaatggcagagacttataagcaattgatactgcatccaaagaatgacaatctttgtgctcatcctttgcacaataaaatcaagtataggccaaaatctggccaataaggtttctatcagtgtctttccatttcctctaattgtgcctttttgctttgtggaaattaatggaagatgcctctttgaataaaaggaagttcaaaataaaatttactattttgagaagatccagaatgtggactgttttcaagcagatatttgacagttcttaatctggtgggattctaaaaggtcagtaagttggcttcctaccagttattgctggggcaaagggaaccttccttcattctttgattcagaatttcagtctctagaataaacttgagagtagacaggttaataggagaaaaagcatacacatttattatgtacatacacatgaggtcccacagagtgtgagactcaaagaagggcaagatgattgaagcttaaaaagcattttgagctacagaaatagggttttaaagactcttggagggtggtggcaacaagctatgaatgggtgaatggaggaaccacactgcagacaaaggatgtcttattctgcggatagtctcgcaggttgcagccctcagaagaataggtgaaaagtctctctgagcacagtatcctgggcatggagaccttttagtctcctctcctgccacaaagagttagaggatgaggggattaacaacaatctcattcctcctggaggaattttccctagtgaaataagggaacttcagagaaagccccctgaccaccccaaacttcatgagagaaagaggatagtgagatggacagactgggcctggggaatggtgagaagtgaagtgggaggggtcagagagaccttagatctgaggctgcttctttagttaaaagcaccatacttctgggtattgttttctgagcccaaacattattaaatcatattatatttgaatatcacaaatgaaaatcattacatgaattaatcagatcttgatgttcttttaacagtatggcagcacctggagaaaactgtgaaataggtatacttgatttagtctttggctttagaattgcaaggaagaggtgctaagaagtggctatttgatcaccctgcaagctctcctctctgtgttttcctgttcccaggttttctccttctgctttggtctgccagtcctaaagaggaaacacattcacactcaatcaggagtaacttacttccattcactcttccaggagtatttgagcatcaaaatgggactgtgaaaaggaaatgcattatctgaaggaatggatgccaagaccccaccagcaaatgtggaaatttgaggggagtgggttctgtgcacctcgaattcagccacatgtttacccatgctactctacctaaccaatgagctgccctttcttggcaattcagtcttctttcaatatattaagagcagggtgttatcatgtgactcattttttttcgatgtaactttagctgcttgcagaaataaaattgcttcttaatagcagatctaaagagggacaaatcacaagaatgttccagttaaatttatattttctgtaaatatgccaactgcacttgcacttctttttctttcttcttttttcttattttcacattttccctgaaccttctcttactgaaaagaaaataaaaggctataaccatgcacacagatattgctctgttttgaattaggttgctatgttaaccaaaagaaaaaaaaagttaccagctatcattgttccaaaggttgatttctgatttctctaacttctgttgtgtctgcatttctctcctcatttttcaaagaatgaccctcaatagcttaataaatcagctaacaaaatgttttagcatctgctaacattccctcagtgtgttacatgcatgttcaaaggctttgttagaaaacacaatgaagggaaaccacaggcaattctgacaggcaatatgatcgggtttcaaaatacttcaaaaccccaatctttacattaagactttgcttgtaaatatttacattgattgcccagatggtggcagaattggagaatgtggatcactttttttttagaaatgtctcttaataaacttaaagattcataagccacaattgcaaactttagtaaacacagtactacatgttcatgtgaaaagttttgcagctataattattattagttttttaaatcagagcaatgggaagtgaaaagatacaagttttcttcagattttgaggacagcaccttcctgcactatccgtcactaagataagcctgggtcttggttgcttctaaaatagttcaattcaagacaatgaacttgtgttgactaccaacgatgtgaccttcattgtgccaatgatacaaaatcactctaaagtgtagccaggcaaagaattacacagttaaaggagaaaggatgtgactccttctaagtaggtataatcaggatcctcagcagctcttctcttacctggtcagctgcagttatctcctaaaagttcttcttgcttccacttttctttctctctaaaccattctctgaaccacaaatgttccaaatctcaattccatgccactctcttgcttaacacacttcagtgaatccccatcactcccaggacaaagtccaaatcctaaagatggctttcaagacctcccatgaattgtatgtctcttggttacctcagtgaccctgtctctaccacttttgtccccatcctctacttttgggtttagccacacagaactactcatggttacctaaatagggtactctgcttccgtttctatgcaagacattcatccagacgcccttcgcacaagcctgtattctagagggcaggggcgcggggggcatgagaaggcatttagaggaattgttcttgtggcttagcagccattgtgcaaataatgtggattttattagtaggagtggagagaaacaactaggggctaaagccatgtgcaagaggggatgggcaggaaggaccagctctaaggacaagagcatgcaaggcctgcagtgaaaaacctctacgtccttcacgatcccttaaaaatctacctgcaaagcagtcattccatccccctctcctctgcatccccactccaacttggccaacccctaataactttgcttcagaggtcacctctctccagaagactttcccaagtctcaccagcgcttacctccctacccccagggaagggtcccccagaggtctctgctcaaatctggaagggtgtttctcacaggccattataatttgttctttgcttctctgccttctgcaccagactgctcaatttctggaggatagggacagtgccttgtctacctttgtgtccccagagcctggcatgcacactggcacaagataggagctcaaaacctttgtctccccagagtctggcatgcaagctggcacaaaataggagcccaaaacctttgtccaagatattgaataaacatgggatggcgtcagacattcactaagcatgccccagcctctgactcaacccccaggtagagaccactatcctgtcactctcctcatctcccctcaacagatttctaggcttttcttgctcagatttgaaaactaggtagaaaactgtctcactgagacagccaagtaaaaatggctccccagagaacttccgactgacctgagcactgggaggatgggacggggccttgggaagttcctgccagttgcggaggtggggaggagcctggcctctccggttcctgggtggacctgggattcaatcagtgagatgggggcctgtgaacaggaatctttctcgctttgctgagagttttgtttgtttgtttgttttgttttgtttggcccaataaattctgtttttctcacccttctgtgtgtccacgaacctaatctttcctggtcatgtgacaagaacccagtttttagctgaactgaggagaaagtcctaacaacatcagtaggtggcagatgagtgtgaaaagttagtgagtgaaatcagaataatatatattcaagagaggagagaggaagagaaagagaggaagaagctgaggtttgacaagagagaggggagagttttagtttcttttgagttgatttgcttggtttgagaacaggtgttcaagattagtgcaggatttcagaaattgtagcagagaaaaaaagaaatggaaaagaagttgactgttgagacttatgatcttgttgatacccaagaagcatcatttctgaattggaattctttcagattaaagttttatttaaaaatagattgagggccagcgcagtggctcacgcctgtaatcccagaactttgggaggccgaggtgggtggatcatgaggtcaggagttcaagacccagcctggccaagatggtgaaaccctgtctctactaaaaatattttaaaaattagccaggtgtggtcgtgggcgcctgtaatcctagctactcaggaggctgaggcagaggattgcttgaacccgaaaggcagaggttgcagtgggctgagattgcgccactgcactccagcctgggtgacagagcgagactcatctcaaaatacataaataaataaattgaaattcccttccctttttccttactggctttgaactgtgtttatttgtgtgagtacagagatcagactatgagaatcatggactctttcaagagttatgaataaataaatgagttaactaatgaacaaataaatgcatgattgaccttccttccttcagagtcatggctgcagtctccacccatgaactccccacgggaaaaaaaacagtcttctccccagactttggggaatatgaagcagccaaccatgaaaaagttgataacttttctctttctgcaatttgtcttctcaaaagaggaatgccatctgaattagctcccttaacacttcagagccacagcatcttctgaatagctggcacaattttcagcaacattcatttcaaatcctgttgactgaacatgtggttcagatgagagcttattatatattgttaaatgatttcattggattataaatcactgccttcacaattctctgtgggacacacatggaattctggttaaaagatgttcaatattgtaaccctccagagagaggcttcccatgacccttcctcatgcagatgatatggttaagcatgcatggccaggctggcctgcccaacgtggcttggatgaggtttctcttcccgaacttgagcaaggttttcccttagtacttgaccttgtatcatcctctcttggccttcagtccacccattccttagctgtcccttcaccttgctgacccaccatctcgctatggctcccttgcagctgattatgtcttgtccctaactgaaaaatagaaactaaatacattttgaaggaaaatggctaactactgataaatactgctttgccattaggggaattcttgagtaagatgatagtcagcagtgaatagtcagtgaaaagattatcatctcttctgcaaattgtccctggtggagatttgattatatgcttaggggccaccttcctgtcttttagaattttctggagcagctgtcattataattactgaggacctttatgtgaccttgtcatcttgggcaggtagctcctaaagggatttctgaagaagacaattcatattttctgtgcacctgccttctcaatattttttgttttcacttagtgtccctgaaactctttctctcttcacatttcactctctgcatcactaatgaggcttccatttacctctttaattaattaattaattcaatatttatttggcacctattaggccccctgtaggataataacaccttaagctctggtctcatttaggagaatttgcatttatgacaagactctagaagacttaaacttttaaggccccaagaggtaaatttctaatggttggccacccctgagttgggaggcactaatgtggactatgaactggatcatcagcatgtagaaccccagaggcagatttctcctgaagttaataaagctccagcctcggggtctcacactgacacagccttttttttttttttttttggctgtacacaagtgttttcggtcgctttatttataattgccccaagctagaaaaaacccaaatggcttccaacagagcaatagttaaacatccatatgatggaatactacacaacaataaaaaagccaacttttgatacatgcaactacttgtatgaattttgaaggtattatgcagaatgaaagaagcccgtctcatattctatgaagccgttgatataatattaacaaaaagacagaaatataataatggagaacagatgagtgactgccaggggttaggtgttaggggaggatgtgactgtaaagggagttttttgaggttatggaactgttctgcatcctgattatagtggtggttacatgaacctatttgtgtgttaaaattcataaaactgtacaacaaaggacaaaagtcaattttacaatacaataacctaaagataaaattaaaaaaataccttttgggcaaaaatataaattttgggaacggtattagagcttcttagctgcctctgtcatcagttctgtctttggtgcctctcgtgcttgatctttatgtactagaaataccagaatatttatagtaccccaaacacactatgcaatcttgcctccatgttgagccttctgccttcctgatatggaaaactccttttcatccttcaaaaccttactcagagcatgcctcctctgtgcagctattttttctgatttcttctcaccaccagatttaagcacacccttttcggttctacttctgcttcttgtaaattatttcactactgtgtcttacaacttattataatgacataggctagtttttgtaattgtttcttcttttcagtaaattggatctccaaaactgtgtaagcttcaggccccacaaaatctagaccccaaatgaccaatctctctctcaatttgttctagctgctgtaacagaataccataaatgggtggcttatatacaacccagatttctcacagttctggaggttgggaattccaagatcaaagcactagcagatttggcttctggtgagggtacaatcccttgttcatagaaagcatcctcttgccttgtcctcaagtggtagaaagggtgaggcatctgtctggggcctattttagaagggcgctaatcccattcatagaggctccactctcatgacctaattaccttccagaggccctacctcctaataccatcaacttggcgattaagtttcaacctatgaattttgtggggacacaaacattcaggccatagcagacaatctctttccaaaaacagaagatttgtgagatcaaaagccatgtctatcttatttaccagtttccaaaacagcacaggcacatggtaggagcacaagaagcatttgttagatgttgaataagcaattatacgtataatgtgcatagctcttttcctgacatgtagtatgggctcaataaatctttgttaaaagaaggattactttgatgaatgaatgaatatgaagtgaaaggtaggtgaaccctacatttctacacaaggagatgttctctctgccttactcttccctattcatctatggtagcaggcaagctgatttccctaccctaagaccagtgatagtccagcatgggtgaagccatccaggaatagttaaggcaccgtgctacctacacgtggttaataaacaggctcttgttaacaagaaacagttatgtggaaatacttcatttccatctgtaaagttctagatttcaaagtggagagctgggatctcttcccacttcacccactcctaacatttataataaagcattgcctaacacagaattatatttttagagaaaaatgaaacacatgcttgagaactcaatcctattaacacaattttttcagtagtggtaaccattaaacagttatgtatttaacctttgtattctttaagtctgctaaaatgtctaattagttaatcaggaaaataattatttgctaaaaaagggaaatttgaaaattgtgtacagatgcataaaactgagttcaaaataaacttctattttgaggctttagtgcaatcccaatgtattagcattttatgattctttgtattcattaaaatgtttttcacaaaaatattggaaagtttcccaaagtcctcctcatgttcctcctggtgtatatcaaacagaatattggactcatctactcaaatcatagttagaattgtattttgtaagaggctatttccttggaagttattcaaaagatacatgtagggaaatattctgatttataaggtcaatctttctctgtcacaaatcaattataagtaaactgttttcagaactgtcttttttgctatttataatagtcaacttgtgaagcacttaacacacagaaatgtgtctgacaccaagattattgttaagggctgttctttcctttttattcagcattgtacgcatgtaccatttacatttattacgtggataatgggaattcatggtcttgaaggcatagagtgaagaaattacttctgaatacagtatgcaagctgaaaagtagggagtgatcatttcaaggttatagtgagggcaactaattttttccaatttggggagtaaaacaattttataatgcatttccaaataaagtctattttatatggaatagtctacagttgccaatcaacctgcccatccaatgcccctttccattggctcccactatcctaatcctaattagtctcgacttgtcctggtgcttttggcaggaagaattacgtttgctcatgctgttcccttgaccatgacatctcttaaaggcaattcactatattgtctgagattctaaaaattaaacttccctactgggatgggtaatactgagtgtcaacttgattggattgaaggatacaaggtattgatcccaggtgtgtctatgaggatgttgccaaaagagattaacatttgagtcagtgggctggggaaggcagatccacccttaatctgatgggcacaatctaatcagctgccaacgaatataaaacaggcagaaaaaggtaaaaaggagagactggccaagcctccgagcctacatatttttcctgtgctggatacttcctgccctcaaacattggactccaatttttcagtttggtgactcggactggctctccttgctccttggcttacagacagcctactgtgggaccttgtgagcatgtttaatacttactaaactcccctccatatatatatatatatatgaaggatatatacatatatgttctgtccctctagagaaccctgactaatacacctacccaagctaatgctttctctacaatgaattgcaaagaaaatgaaagctaacaaagaagatgagtttggctttttaagaaaacagttgaccagacataaaagatctcagggtgaggaaaaggcagttttcttctgaaggcctacagatggaagggacagtatgggtagctaaggtgactgaattcccctctgcacttagtgtgtctggatacaattattggctctggcaatttgggtgctgtgctttcaggacatagtgtatggtgaatggtgggagaattcaaatcatagactctgacaaaaagtatgctccaattctgtttccccatctaataactacaactgtggacaatgtatttcattaccctgagctttggtttctttatctgtgaactggaaatactaatacctacctggccaggttgtcaggattgaagatagtatataccaagtacttatcacagtggtttgttagcaaataagcactaaacaacagtagctattattgtaatgacgactacatggtccttatccttctattcagggtgaggtgagctaagatagttctaagagtttaatgaagcagcattgcctcatgactggtaagaataagaagacatggggaaaggtgtttatcatttaaggaactaaggtgaacagaatcaaaaaggggttgtattgtatcttaggaaactaagataagactggaatacagccatcaggatctatttgtaataggatgagagctcagttgcaaatacaagttccattcatttgatgaaagagtctggcctgactgaggctgtgttttgaactcattacagttagactcctgtggctcaatacccatttgtgctggggctgtattgttcttcatttcaacagacatatgcaaatggttctgagaaatgttagagcctgttcttctaaagtgaagttagtctttctcctggttcttactctagaaacaataacattgttgggtgccccctgtctttcacctcacatctatttcatccccaactaatgtcagtggtgctaccagtgcgacagtagactaacgtcctctggtaggaaggactcaactattctaacactcttccacatttctcttaagttgtgctggaagcagaagtgattgagtttcattcattcagtaggtattcaacgcctaccatgtgttaggtgctctcctttgtgctgaggtaaaataagtaaagcagacaccgtccttgacttcattgagctcagggactgagaaagatgaacactaatcaaataatcacagaaataaaaaattttaatggcacattgtgataattgaaacagaggacaaattgagaatgttctgagtttttaaggggcctctgacctatcctggaagtttgaggaaaggcttcctggaagaagtaccactggagatgaggtgtggagctataagtgggcctataggagtggggtggcgaggcgtgaggcatattctaggcagtgtgggacaaagtccttagacaagaagcagcccagggtatccaataattgaaaaaggaggctggggtgactgggggtgggggaggtgctaaagggtgaagaattaggctagatgatcccatagggaacttgtaaaagttaactatgcccagacccactcctagacattctgctttaattggcatgggatgggtccatggcattgccatattttatttaaaaaccaaactaaaccacaaacacacaaacaacaacaaaaacaaacaaacaaacaaaaacaacctcccaggtcattttaacatacagtcaaagctgagaaattctgaggtacaacatgcagcaccttgtagccatagttttcatcctaacaacaatggggagtcctttgaagattttaaggaggggggtaattagtattaacattatcagatttgcttttgagaagagccctctggctgaaatatggcaatggatatccatggcatctaacaaatcttgctgtgcacccggtaaacatatagtggtagactcaaagtagactgggcatcaaatttactgcatgtgaagactctagatcaaaatgcaacttggtggtgatagatcctcctctgttgaataagcggatcatttcattcaagactgtaatttctaggtggaatgcaagcacagactttcaaggaagcttgaaattcctgacttggtttgggtccatttagagagatttacaaagagaagaagcgatatttagggcacaaagctatatctggcacaggtgacttgtgttagacctggagactcaggcctgtctcttagcattgaaggttcctgagctcccagcaggccatgtgtggctcccaaatctccagtgggaaatatggaaacactttgaactcccttcactatcactgaaggaaacagaacccgatttcagcatggatattgatttttaaaatgcacttcaaatgcacagaaacttgtagtgggaatgcaaggagaaagcagggcatcctgagaaccatgttacatttaggtcattaatcaatacgggatcagaaattgaggaggtgggtgttacaaaacttttcttaatagaatatcatatatgtgacgtaaaaagtcaattaaaaatctcattgatgaggctggttgcggtagctcatgcctgtagtcccagcactttgggaggccgaggcgggcggatcacaaggtcaggagatcgagaccatcctggctaacacggtgaaaccccatctctactaaaaatacaagaaattagctgggcatggtggcaggcgcctgtagtcccggctactcgggaggctgaggtaggagaagggcgtgaacccgggaggcggagcttgcagtgagccgagattgtgccactgcactctggcctgggcgacagagagagactccctctcaaaaaaataaaaaaataaaaaaatctcattgatcacctttgctaagaactaacttaactagttatttgaaaacttttacaaaatattaattatgtttccaaatgaccaagattgaaaaacaggaaagatgagtaagtcttaccataaagttatcaggaggctacacaaaaactaacaagtaattacacgaaaatacggggccctttcttctctcaacttcgcagtttcactcttcctggtctctcacctactctctatggtgtattttcagtataaatcaaatataattatctaaaaagaatgaaagcatatatatttcaaaatagttcacagaaaataaaagatagcagatgagaatagagggagaaagatgtggaagagaagaggtgatggaagacaaaactttgccagaagagacaaaagaactttaaagtctaatttataaattgctaatctgaacaaactaatagtctttcaatgcactcagtgattggcgtaatttatcttggctttaacaaacatgctgatattgcttcttgtaacacatttattaccagaagaaaaatataattggtatcagtgtgaatgcctttggctgcaagtaacatcccaagtcagctagcttcaacgttaagcaaaatttgttacctcaaagagcaaggaatcttgagatggggtggctttgacaacttccgtatttcctccctgccattttcaaccagttagatttgcccctggcaaccatcccatcatggttgcaagatggctgccatagttcctatcatcttaagacactgtaatatctactggtagaagacatacagtttcttcctatatgattcattataaaaagcaagaaatcctttccccaaggtcctcagcagacctctctgatgtctcattgtgaaaaacttgatcaaaagccgacctgcctgtgatccatttaccagcaaaataaataagatctctctgattgaaggattggtgctgatgaatgaggttttaaccttgaataatgtaggggatgggtgaaccaacagagttcttctgggtagcaagaaagattgaatatttcttaaataggttgctataacctgcaccagtgtttctcaaacttaatgtttggaatcacctgtgatcttgtgaaaatacagattctggttcagaagttctaggctggggcctgagatcctgcatttctaacaagctctctggtgattctgatgctgctggtccacagacaacactttggatagaggatctagaccctagacaatcagatgagaagcagtctagtataatatgattgaatacagcttatattagactgtctagctgggtgatttggggtatgttacttaaattatctaagcctcagaaaaaggaaggaattggggaagaagaaagaaagggagagagggaggagaaaagaggtgtgtgtggggaggtgagtcgcagactcattgatgagaatctccaaagcagtggtgtttctgttcgcttttctaattcattaagatccctctgtggtgatgaattagagaacttggaagaaaataaacagcgtagtgtttaatatgagcattcaggaagaaaataaataaactatactaataaaattctgggaatggtaacaaatgtatatgtatagcagaataaaaaacctcagggtcccagtgatagcaaggtatattgaaatactgcagtgatgttacagttacaaaacatactctgcctttctgatgcctaacaatgcatatattatgttctgagctatggagttctgaaggataaagctttttgcccctgagtcatacccagaaaggaactgtggcagacttagggataggttatgaggaaggagtaaaggaagaggaatcctcattatgaaataagaccaaatgacacacctaacccaacttcagggggagataggtccttacttgacagggagaggcaaatggctgtttcctgtcttgacagatcagatagaaaagtgaacaggatgcagtagcagaatgagggtatgtggaaagatttgagcaggacccctgagtctagatccctcccagtcctgcttttcactagccctgagtcgttgggaagttggcttaacttatcctagtctcaggtgtcttccaagagctactgaaatagtaatagaagtcaacgtacacatgataaaacaggtagcaatggagatccattatctcacctactacctccctgataatcccataatattggcatcatgattatgtgttattaactctctggggaggggtggtgttctataaacacatatgatttcgcttactctccgtaccaagtctactgactcctttctgccttcaatagcaatattataatagcagaagaacactttgcatcagttattttgttggtcttcattaggcattaaattcagtcaaatgaagtagtgattttgattccaaaacacttagtgtgacagtccttacctctgaccttgttttgcatgtgtcacagtgttttgtaaacttttcctgaatgtgaaatggatgcctcgcgtgccctgctttcgccttgcagtctgactattccatttctgtgcacttgaagtgcattcaaaataggcaatatctgtgctgaaatagagttctgtttcttcaatgataataaaaaagaatgtcagttttttgcttaaaacccacaacaggtagttagtggaaacttgaaggtacgagttatgagcgactttaaaatatattttcttctgtgttgttaatggcttacatatggggcttcttgcagggtgtaggaaacttctaaatagtcctaggagacacacatgaacaaaaaggtcatggcattttgaaccctcactgctgccttctttacaattacccatatgacctttggagaggcatctcggagaacaccagggatttgcaggaaagccgggctgcttggcctggctactttctacagaagccatgactgctaaaatggactctcagtcatccccaggctgagaagttagggctgcagcttgatttcaaagaatgcagatctaaggtccaaggtgcaattcattgtccacacatcaattaataatgcaataccagactccaagaatacaagacagcagtgtttttcaaatataataacttgaggaagttggtgagaaattgatacaaaaaagtaaaatatgagttcatatagcaattcccaatcatgataatacttctactgggatatatccatttgaatttactgagaaccttcttatattggggtagtttagaattagttctatctacaaatagtaattcataatgactgtggtattggtgaagatgatgataatggtaagtggtaacatcttttaagcatctaccgtatgccagaccctatgctaagggctttgtaggtatcatcttatttaacccagtgcaaaaaaattgacaaattctaggcttaggatcaacatgaggataataaaattttcttttggtaattacatctaaggacataagtacaattcacaaaccttgaggtcaaggacttcacctttcatcttttgatggtgctgcacagtgcctagcagagaaaagactccacaaatatttgttgaaatgaaagaagcaaggaggaaagttttcaaagcccagaaatctgaattatatttgtaaaactaactcagtttaataaaatgtgtcagtgttaactacatcatttaaatgattattactttattttctaaatttttataacaaggagtttaacaatgctgccttagggaaataacagcacaaatgcataaagatggttgggtaagaatatttgtttcagcactgcgtggtacagcaaacataaaacagagccatttaaatgtgtgaatagagaggcaaaaagaaaacaaggatgcaaacttttttttttattttatataattaaaagattaaatgttggggtaatagtcacagactaaatatcttatattcattctgcagacatctcagttaagcatttggaattatgcatgattttttatttatttccctttttctgtaattttaataccacaaatctttttgcaaaatgaagagtccatatttttgctacagaaaccaggagatcagagttgccaatgtggaattatggacattggtgtgtctttctgaagagaaatctaaggctgctacgtgtaccagctgggatcctttcacattaggataattttaatggtagagcacttggcacaagttatttccttggtcttcattaggcataaaattcagccaagttaactactgatgcttatcccaaaacactttcactctaagacttcttaccttggaccttgttttcaaatatatcccattcagatttttcctaaatatctcccatccaagtactaatcagggcagaccttgcttagcttccaagattagatgagactgggcacatttagggtggcatggcctctgtattagtctgttctcatgctgctataaagcaatacctaagactgggtaattgataaaggaaagaggtttaattaactcatagttttgcattgctagggaggcctcagaaaacttacaatcatggcagaaggcacaggagaagtaggcactttcttcacagggtggcaggacagagtgagtgcaagcaagagaaacactagacgcttataaaactgtcagatcttgtgagaactcactcactatcacaagaacagtgtgggggaactgccaccatgatccaattacctccacttggtcccccacttgacatgtagggattgtaggtattacaactttgggtgagatttgggtggggacaaagagccaaaccatattattctgcccctggcagaatctcatgtcttttcacatttcaaaaccaatcatatcttcccaacagtcccccaaagtctcaactaatttcagcattaactcaaaaatccacagtttaaagtctcatctgagacaaggcaagtcccttctgcctatgagcctgtaaaatcaaaagcaagttagttacttcctagatacaatgggggtacaggcattggataaatgcacccattccaaatgggagaaattggccaaaacaaagaggctacaggctccatgcaagtctgaaatccaatagagccctcattaaacctcaaagttccaaaattatctcctttaactccatgtctcacacccaggtcatgctgatgcaagaggtgggctcccaaggccttgggcagctacagccctatgcctttgcagggtacagcgtcccacccagctgctttcatgggctggcgttgagtgtctgtggcttctccaggcccacagtgcaagctgtcagtggatctaccattctggggtctggagaatggtggtcctcttctcacagctccattagacagtgccccagtggggactctggagactctaaccccacatttcccttccatactgccctaacagaggatctccatgagggctctacccctgcagcagatttctgcctggacatccaggcatttccatacaccctgtgaaatctaggcagaggttcccaaactcaattcttgacttttatgtacctgcaggcccaacaccatgtgtaagcttccaaccaaggcttggggcttgcaccctctgaaacaatggcctgagctgtacattggccccttttagccatggctgggactcaaggcaccaagtccaaagattgcacaaagcagcaaggccctgggcccagcccatgaaaccatgttttcctcctaggcctctgtgttgtttgtgatgggaggggctgctgtgacaacctctgacatgttctggagacgttttccccattgtcttggtgattaacatttggctcctcgttacttatgcaaatttctgcagccaacttgaatttcttttcagaaaataggtttctcttttttatcgtattgtcaggctgcaaatttttctaacttttatgctctgcttccctgtaaacataagttccaattccaaaccacatctttgtgaatgcataaaactgaatgcttttaagagcacccaagtcatatcttcaatgctttgttggttagaaatttcttctgccagattccctaactcatttctctcaagatcaaaattccagaaatttctggggcagaggcaaaatgcagccagtctctttgctaaagcatagcaagaatcacctttattccaattcccaaaaagttactcatttccacctcagcctggacttcattgtccatatcactatcaactttttggtcaaaacccattcaacaagtctctaggaagtttcaaactttcccacatcttcctgtcttcttctgagccctccaaactattccaacctctgcctgttacccagttccaaaggtgcttccacattctgggtatctttattagcagtgccccactctcagtaccaattaactgtatcagtcctttcttatgccgctatgaagaaatacctaaaactgggtaatttataaaggaaagaggtttaattgactcacagttctgcattgttgggaggcctcaggaaacttacaatcatggtagcaaagaagaagcagacaccttcttcacagggcagcaggacgaaataagtgcaagcaggagaaatgccagacacttataaaataatcagatctcatgagaactcactcactatcacaagaacagaatgggggaactgcccatatgatccaactacctccccttggtactgcttttgacacattgggattatggggattacatttgagatgagatttgggtggggacacagagccaaaccatatcagccccagaccctaattaatcttgaacctgaaataattttagtgttgcctctctaaccatttgtgacaaagaatgagtttggtaagacttagttcaaactttaagttaacagatattctttatagaagagaaaaggctctagctgcctctcttagaaaaatacatatcaaggccaggcacagtggctcacatctgtaatccctgccctttgggaggccgaggtgagtggatcacctgaggtcaggagttcaagaccagcctggccaacatggtgaaactccatctctactaaaaacaaaaaattagctgggcatggtggcaggtgcctgtaatcccagctactcaagaggctgaggcaggggaattgcttgaacctgggaggcagaggttgcagtgagccgagttcacgccattgcactccagcctgggcaacaagagtgaaactctgtctcaaaacaaacaaacaaaaaacaaacaaaaacaaaaaagaaaaagaaaaagaaaaatacatatcaaaaataattataaaaattacttcattgctttacttgtttttctgtacacaacccagtgagttctcttccaacattttatcatggaaaatgccaactatgtgcacaagtagaaacaataggataataaactcccatatacccattatatagcttcaacaatggtcatctcctttcctaaatggctttatctgtaccctatcccttattttcccagtccctggattattctgaagcaattctcagtatatcatttgacctgtaaatatcaccgtatatatatttctaaaatatagaatagtttaaaaataatactaatacaacactgaaaatttaatattaaatttcttttccttgatataataagttattattcatttttaaattgtaacttttttacatagtttgtttgaatcaagatatcttgtgccttttttaatctgtaggtttctgtctgtgctttctctcattctccagcctccctccctgtatcatcgctatgattgctgtttatttattgaataaatcagattgttttcctgccaaatttcctctatctagatttagggattaaatatctcgtctgtccatttagagtcagctcattgtattcctgtattgtcattgaatatgttcccttttttcttgtatttttcctaaattaatagttttgtagctaatggactaatcacatcaattcaggtgaggtttaaattttttgtgtgggggaggtggggagtttgtttccataggtaaaagtgttcttctgtgaggaaaatacatgaaatctatttttctctctttctgtgatatttgcagtctttgataatgtcatcttttcccctgtgtatttttgggtctgggatgaaattttgtctttggctacattacctgtctagggattatcagagtcctggccccttcattttgctgagaaaattttgcgagttgcctatgaaatgtatgctgtaggtaacccagtagttactccgatagaacgaagtaaggagataagtggaaagtgagttaataattctaccactggctgtatacccttgcctaggttaagccccatgactgccattttcatcatctgtaaaatgggaataactatacctatggtttttatatacaaacatatatggcacaaaaacaatgtttaataaatgatagttattttgttgctatttaaataatagtactttgataatgatatcttgatgaaataataatatagtttagtctgtcatattttaacactggtttgctgacggcagcaggtttggtccatttcttctatttttatgactaatgttaagaaaataatattacaaaacttggaaataggtaaaagaatgactacaagttctttcaatgtcacactggagtattagttaacagtcctgcccaatgataatttcattttctctggatagctattttactattttcctttggtttagatattttatatttctctaaaggtaaagactggattgcagaaaattaacagtcacataaataattttgtctaatagaaatgtaagtgaagtttgtctggtagaagagataacctcaaaggttattgtttaattatccattagagcaaaagctagttttttatctatcttagctatctacttccacatttccttagagccaatgcaaactcagtctctcaaattttctttgaactagctttatcatcgtgctagttctatcagtgagttaaatcaatcttggacacatgcaatttatattcgtatgacagcaatgtatttaaatttttgaaaatcgtacttcaatatgaagttttcaatctcattggtgaattttgctggtctgtttgatattaattatagattctaactacgctgttgccatttctctagaactcatgggagggtacatattaaacctcattaacacatcatgagctagaacctgtactggttttaggtatgtagccaaagactaaatatccttattaatatcaaataacttttatttcgatgtatggcagtggtcatgcattatgatgttttgaatttgtcaatatattctgtttagaaaaacagaagttcctactatgaaagttagctttctttggctctttatttttaaagtgctttaaggtgtagatttccattttttgggggggttgcatttattcatacatatgtggcaattctaaatgattaatcaaaaagtatcataaattattttttcattcctccaaagactatcctgtaatttccagcccaatacctaccccatctccacctctttcacctgagtaaaggaaggagtctttcttgcttggaaaaaaaaatgtaaaattcaactatattttaaaatgctgagagagaaaggggtggggaaacagatggaggcaagaaattcatcagagttgaggaaggcgaagaagagaaattttgtagggtttttgagaggagattatatgagtgttgtggattgaaaagaaaaagaaaatttaataaaatcagtgagtaatgtgttggatctttaaatatcttcgagaagcttgggtatagaatgaaattaccatgaaattagtttataaatatggtttgaccctaaaccatgcttcttgaataaggaagtacttgggaactaacaacatgattctccaggtttatcatatcatgtctttagtctgaaaatatttattgaatactaatgatgcactaggctctcttctaaagtctggggacatacacaaagacagagagcctgcccttggggaacttacattctcactggaggtggggaggagaacagagaataaacaaagggataaagataagatatgttttatatgccaggtggagacgagggctacaaagatataacacagggtgagcaggctggagagagagaagtgggttctgttttatatagtggggtgaagtaaggtcgccatttagtaaatagcacatttatttctagccaagaagacacagttcatcagattgagatcatctaagtagacatcagattgagtaaaagtttcttagatctggattctggtggcccagagtactgaatctgcagtatttcacatccctcagaagctagtgctgctattatatttttcttggtaaatttgtagaacccagaattattttgaggggtaggcatgggttggagatacatattagagaagagagaactagagtgaactctccctaaaatcactttttatttagaaaaaaaaagagacgctacactgcatttccctagtcaaggtttgtacagttccatgccatattcctacaacatgtttgctcatcagagaaatgaaatgtgaagcagttctcttgtatcagtttagagctcctttgtcaagggagggttattttccataaattcaatgtaaaaggaaggaaacataattcactttcaaggtcattaaaagaataagaaaagttagatcctatcaataaaactttaatatgctaaactaactggcagcaagaaagagagctattttctcaataaatattgtatacatgtgctttgtcaattaactttttttgactgtgaacaaaatgtaaatgtcatggataaatgatagctttaatgatgtttttcagcgttgtactgcctgttaccacggcttcttaacaaagatgttaaatcattaggagtcatatttcatgataattaactacaaatctggtaatattaccacttttcatttggcatgaaatgacgagggagaaccatgaggtttattggaggtacatgacaaaggacagagagacttaatgtatgtgtataaatcttataaaactacctattggacagcattttatgatggacataaattcccattcactctctgctagtgatagacagggaagtctgcagtggaagcagaaagctgagatgggaagtcaccctagagaataaagggggcgtatgggtttatttctttgtcttacttgctcgctcttgcaacagctaaacagatcctcattctcgcctaagttttgaacaattagagtatgcactgttattaattctcttattaaatgtattttattataaagtttgcaaagatgcttttatgattaaggagctattggcatttgccattttacactactaatcttccatctgcttttctttgaaccttttaaaatgttcagcaaggtcactcaagattttattgtagggaaataaaagatcaggaacactctgccttgttaatattttcattccagcctgttgttaatatagagagatagtgatatagggcggaaaggacacttcttatagagttaggtaacctgatttgattttgcttattttgttaattttgatattgaccactgtatcagtcaaggctttttctgttgcaagtgactgaaatccaatgcaaagtagctttagaaaaggagaagacactatgttggttgacatagttgaaattttgaagaattctggcacagctctcaagaacaaatcgccccaacagggccatctgtaccaggctctccatgcctctgctttgctttccttggtgcaagcttcattttcaggcaggctgtctccatggtgagcagaacggcagttccagactcattaatcttgatgcctagagatcccagaagaagactgcagtggctaattttaggtctcaaattgactggactaagggatacccacctaattggtagaacgttatttctaggtatatctttgagagtgtttccaggagagactggcatttgaatcagtagattgagtaagaaagatccacccttattaagtgtgggcagttaccatctaattggtcgaaggcttagatagaacaaaaaggcagaagaaaggtgaatttgctcctttttctcttccggaactaggatcccgttttctcctgtccttgcacattggaactctgggttctctggtcttcggactctggaacttgcaccagcagtctgcctgattctcaggcctttggatttgtactgagtcatgctactgacttccctggttctctagcttgcagaaagcttatggtgggacttttaagcctccataatcaagtgggacaattcctcttataaatctcctctctgtctctctatatgtctgtctgtctgtctatctatctatctatctatctatctatctatctatctatctcctctccatcctattggttctgtttttctggagaaccctgatacaaagactgtttctgacactattgaccaatatccacatcaagggtctggttggtccaactgttcaccttagagttcatctatgaagctaggaagagagaacatcatgctttgattgtccaggcctgagcctgtgcctgcccgcctcacccatgggatggatgctaatcacatggtcttaaaagaattaatatgaagtggaagaggagtggttatctgaagaaggaaatgtcaagcagtcaagtagcatggatccactgcttggcattcattcactcatttttttctaactaacttttaaaaattatttaaaatgtttagtcctccttcaagcattgtgctggtagtgacacaaggatttagaaagggagaacgagcttctaggaatttaaattttagagggaaatagttatgtaagaaacatatataatgcaatgagataaagtattcaaagtcaatgatatattaaaggaaggatcttatgggtttgcttgttagagtcagggaaaccttcaaagaacaaacttaaactgttgtttgatttcctctatgagaaccgggtgcacatcggggctagagtggttcgcacttcaggatgaaacaaccgtgaagaacaaggaagtggcaggagatggagctaaacaggtcatcagaggtagatcttgaaaagcccttcatgtgatcaaatgaaattttattattttttctttctgtgagattggtgatattgatcagatgaataatatatatcaaatgtgtacactaaaaagagcacttttatgggcatgtagaggatcatttgaaagagtaacctccccagcctcagaggactttctggctcactcactcagcaaatattcattgagtgcctgctgtgtactgggtactgtgtgagtcaaaatgtaaggcaatgacaatggaggtagaaaaggagacaaatgtgaaagcaatttcacaaagagtaacacatttgatgtcaaatagctatggtagggaagacacaagactttctggttttccagtctgagctattgggaggaggcaataacattccctgagccagggattctctgaatctgtttactcatacataacatgacaacaataacaagaagccagaatcacaggactattatgagaatgaaatgaaataatacaaatttaaaaggattttgtaagctttgaaacataaaatgagggtaaggtgttattttaaaatatatgtaacatatttaaaaataatctctggttgcttttgattccatgatgatgtaattttctccccataagaagtatctattgggcagaataaattaaacaaaatggctttgctatctaactaaaataagcattatttatctcaaaatgccagtctttaccagcctcactttctatattctggcttttttcccattatgcagagtgttgatttggaggggggagtaaaagccagttgagtttctcataaagtttcacactgcagacttgggcgacagtggttttgtttaaagctgattcattgggatttcctaagagatgctattgtataggtacaataactgtttagtgaggttctttatgagacactcaggattatggatccataatttgcattcattgcaaacattgtaacaacttcttttgagccattaaaatgaaggtattgaaaggctgttaagaactccaccaagccgtgaaatcacaacaggttcatttattggagaaaatatcattaagatacaagccagcattacaaatccagatctcttctacgcagttgtcacatttaacttttttccagcctctctgggcaaaggaaggagctgttatttgagtaagttggggccctgaaatcattttgcaatgcacccatccaggcagccatccattcatccactcattcatttcaattcctaggtgctggggcagacgctgaagaaaataacatgctattcctacagagcttaattgtagagacagacacataaaatatatttgcaataaaatgaaaacatgaaatgataggctaagtgtggggtgctttggatgctgctgagaagacagggcggtaggagaaagaagcaattgctgaaacaaaaagaaaaagaaaggctgttccaggcagccaaattaataaatgagcattgtgttgcaaatttgtgaattctgctccctgggaatcagtaattctatcagctagccttttcacttccattttcagaatttctgatttaaagacaaattaagctaaatgcttagttgctccataaggagtctgatgtgaaaaacccatctatgccatcactgggggttctcattgtttctcatctgtaaagtcttttgggatttagatggatcagctggctgacctttgctgctgtcctatgagacataaagataatattcctcatatacctaaatcatctagcagaaaacctgagacacagtaggcccacaataaacagcagatattatccattgacagaatggtggcttggcaaagtattttaaattgaaaagaagaaatatgaattgcattcccaattcctttaaataattgcattttcttccatcttgtaattaaggtctcatctgaattttgccccatacctataagacattaacaacatagattcatttaaacaaattaaaaataatttcaaatttatttttaacaaatggttagactgtcttttgcaggtgcacaggaaatgaagtattattattagtttaaagaaaaatcatgacagtttcatgactaaaaaagggaaaaaattgtggaggacacagctgcacctgatatatatcaataattagttcctaatctcatgtgtttgtaacatataaatcatctttgtttccaaaaataagagcatagtagaatatctatgaattaaaaatgactagttttattactactactaataaccaatgcattgtaatccaaataaagctatctttgggttgtaaataagcaaacagaatcacaggaaggtacaaaacatccctgtgattgttgcattaagtaccaggtctcttaagtctaaatagattgtctcttgttttttcttctctttgttttgttgttgctttgttttttgtttttagagatagaggtctcgctttgctgcccaggctgaactcggactcctgggctcaagtgatcctcccatctcagcctcctgaatagctgggactacaggtgtgagccaccatccctggccttttgtcatatttcaattgaaataatctgggctagttttacaatagaggtaaaaaattccaactctggtgctttggaattgtataactgtaaacaagctaattaacttatctaatctataaaaaaaagggatgatattaatggccactcatgcagttactgtgagaataaataaaggtccagcatatgacccagtctggaggaggtatttagtaaaaaattgttgcacctatctttttcttagcttatcactcaccccgtattagcttttgcaatgctttccaatttgtaacaacccatggggattatgggagctacaattcaagatgagattttggtggggacacagccaaaccctataacaaagtacactcctgatttggaatatgtaacaattcaaatgcataataaaagaaacgtggctcagagtcgaagtgctgacttctaattcatgatgaaaatgctaactgccttatgaccttaggctagtcacttagccctggggcctctagctatacaattagctacagttaaaaaatgctacatcattattataaagtatggtaagtaactgaaataatggatgttacttaaaacgttatactaatttatataatgactgttttttcttggtttaatgcttccattcaactgtattttttttcatttcctacttctttattactgttagtggaagattttctttgccttgtttatgaattttaatctcatcaaattcttaacatcaggtttggaagggaacttgcatattatctgatggagtgaggtccctgaggtgctatttcctgcttccataccatggtagatgtcatttgaatctctttagtgacagagaactcactgcttcttgaagcagtgtgttcctgtgtttgagaagtactgctatgagattctttctaacaccaatccatttctcagctacttcttgccaaaattctacctttaagggctacatagaataagtcgataatccctgccacatggcatctcttcagaaatttgaaaatgggtaacatacgtattcctagactctatttattcgtcatatgcaatgatttaggtatttcagaagtatccattttacccaagatttataattagtatggtattataacacactgccatatctttgaatgaattaagttttagaatattgcgttattcatatatctatatgcactgcttaaatatagagtttttctattttttctaaagttacaggaaccttatgttccaatccatatataacatcagcacttcggacacttctgctgaatataggaaaaaaatcttcaatccaaaacaactaaacaaaaaaagaacatgttgaagcttgctaggtcaacgttcaaagcagaaaaagtttgcatgattgtgcctgagggcacatgaaatggaaataactatttcctaatcaataagtgtgatcatacctggaggtgaggtcaggggaatagggagcaggtatccagggccctgtctaaaggacaccttgtaggccccagggaaagagaccaaacctctgatgcaaagaaaacaacatggaggccaagagggccaaatctgtctatagatgtactgtttgcatggcacaatgttacaaaaaatacaggaggctgcttttaaaaatcaggagatttggccaggcgcagtggctcatgcctgtaatcccagcactttgggaggccgaggcagatggatcacctgaggtcaggagttcaagaccagcctggccaacatggtgaaactccatctcaaataaaaatacaaaaaaattagctgggcgtggtgatgggcacctgtaaccccagctacttcgggaggctgaggcaggagaattgcttgaacacaggaggtggaggttgcagtgagccgagatcaggccattgcactccagcctgggtgacaagagcaaaactctgtctaaaaaaaaaaaaaaaaaaaaattcaggagtttttatataaactctagattgcaacttctcttgaagacttggaagtcctggcaatattgggcctgcatttccactaatcaagcatcggatgataaagctgatgggatgggacatctccaggtgacctctttcccaccttttcctatgtgtaatgtactgaacccactgccaccatctttattgtttgcctgattcctgtgggcattcaaacccccagttattaggtacctggggctatgcctgcctttattatttcagccacatccttctttcttctaaacctcccgttttctttaattatttactcaacccaagatagcacatgtatgtgcaagctttctcaagtgtaattcttcagacaacacagggtggcttggtgctcagatctcctcctctgacaaatgttgagacttctccccttcaccttttcacctgtaatccagtgggtctccagtattttttcctgccatgctgcctgataaatggtattctcctgtgggctacattctcacttttaacaatgctcacttgggctgccacaaggccaaaaggagctgcagctatgtgcccagatgtaacctttgtctcttccttcccccaactgtgtggaattgacgttcttggtttttagtgacagaaaaccagaagccagttaaaatatctttacctggcctataaacccattaaaaaacaaacaaagaaacaaaacaaaacaaaaacactctctttaggcatcagggagaggcaaattaaaaccatggtgagaagtttctagacatcggattgcttattgtattactctttgtaactttgtgatatggtttggctgtgtccccactgaaatctcatcttgaattatagctcccataatccccacatgttgtgggagggacccagtgggaggtaattgaatcatgggggcaaattttcccatgctgtttcatggtagtgaataagtcttatgagatctgatggtttcagaaagggcagttcccctgcacattctctcttgcctgctgccatgtgagacatgcctttgctcttccttcaccttctgctataattgtgagtcctccccagtcatgtggaactgtgagaccattaaacctctttttctttagaaatctcccagtctcgggtatttcttcatatcaatatgaaaatagactaatacactttgactatctaatatagttcctaataacaaaaattggaaaaaggaaaaacacaattcttcctgcctttcctttcttgctaagtgcacagtctgttgagatgagaaagagaatgtgttgatgtggctttgaaaaagaggtgctgggtctggtaaccaaagactagatggagggaagtttctgtgtataagtgaaatagcgatgatagaatgccattttgcaaacctaattaattcaaggatctatgcaatacttatcaatgtctgtcatcacacacacacacacacacacacacacacacacatgcacacaccccagaccttaagtgtgtcttatacatcatcacttataaagtactttagccaccactcacaccccccaactcaccaatcctccagacataattgtggagtcctaataaggaaaaagaagtcaggctggtgggaccaggggaaagtataaagaaagagcagataagctacaagcctgcctttcttcatggtccaggacatgcagccctcctgtacagatagctcataatcttcctgcacctgacttatcacgagaccctcggctaatagaaaaatgcaagttagctcactgccacattggcattatcaatactgcatgtagccctctccagcatgagcacaatcctataaaatccccagcaagcttttgtctcctggcagtcagctcctctcttgatgatctgcctgttgcacccttgcaacatattttcatactttctctaataaatgtgccttttgttacctacaactgtcttggtaaatttctttaccacctacaccaccagccccagttagccgctacccacaacaataactattgattaggaagtgcagagaagagaggaacatgttaaattataccatagagccagcaaaattcctactggaaaattctacagatcaaatgacccagctttttcaacataaaaattagaagagagggggatagaaagagagagacagaaaaagaatctatttaaaatatgacttaaaagacatccacctgaagcaaatgtaacaaaatgatcacttattaattctgtttgatgactacaagggtattacacagaattgttctccatacttctgtagcttagttttcataattatatgatgtttctgtggtcaaaaacaaacataaagaccaaatttggttcaaaaaataacagagagagggaagtgagtagaggcatacatggcattttaattttgtgtatattggaaatactccatattaaaatttgaaaaacaaacagaagcagagatgccaatctcccccactgcactctcacatacctgactgctagagggtaatgttctgtcctaataagactgtatctacccagtctggaaaggaatttggttgtttctgatccctaagaagaatatctcatttgcctttttctatggtgttatcagaaaatgctttgcagcaaataaatggcaactccataagtggatgttaatgaaattttaatgaatctgaggtgctggcaccatatattcctgcagagctcagttttttaaaaatgctgctttaatgctgaaagtttacagaagaaaacagcaacattaaggccaaaatgaaggtagcctcggttggggagatttttcccagcgtagtaaattgtttggccttcatttccctggtcccctggaggtctgcaagccccatggtcagataccctgtggtttccagtgctgggcggcttacacaggagaaaggatccatgatttctgctttcgtcctctgctgcctcttgatattgagggcccctgcatcacttaaaatgtttattgcagattgttcctttttgcccttctaagtagtctgtaaactctattccaggcaggggctgggagagttattgcctgttgatacactcacccaaataagtgctgagtgttctttgctacacacatatggactttggctcagggcccagaatacctgagtcaatttcagaatccaattgttacagcgggcttgtatttttagagaagaaaaaggtgtgcatcctaagatccaaaagctgtctacatttacattccaactttctttttaattaagaagatcacaaaaatcaatagagaatttactagcaaagagggccatactggaatgatttggggaaagaattttgctgcattgacagaaagagggcaggggaggtgtttaccaaaccatctgtaactggctgggtttttctcatttatttcagattccattctctctattcattctccatcccatcccatccttggaccccatctcttccagaatgttaactatgccccatagctatgaaatgaattttccataagagaacaatttcctacttttatggtgctagaacaattgtgtgcattgttagagacccctatatgactttgacttcgtcagaagagaatagtaactctccattgacaggtcctggtgaccgaaagtataatcaaagtcagtgcattattaatgactcttctttttaatgactcaatcacagtgtgaaatgtttttcaaacattttattttatataatttttccacttgggaaagtctgcccacaaattaagggaacacaatagctgaataaaaccagaaatattgtgctggatgttctccaaacaaattgtccttcaaagagatggccagaagttctgatcaattttttcatgacaagtgggggccagataaaggatatacctggatcaggttacctgagaacacagattgagaactgggctttggaatctgacagccctgatacacctggctttattatatactaatgatatgatctttggctccttttgaaaaagctctcagggttggtttcttcctctgtaaaatgagcctactgaagcctctggaacaggggttgtgtgaagatcctatgagataatgcatgtaaagtgtatctccctgggccttgggttgttgactccttattctgttccaagcacccagagtggagaaaaaggcagggagagcaattccagccgctggctgtccatactgctctgagctctgtgacaggtaccaggagaagaaacagtggcatggggatgggcagggaagagaaatggaagcaagagagagagagactggctggcataagaagagtaagggttacattcagcacaattacctttgagatgtaaacaccaaacaacctccaagggtaaaagaagttcaagaattccagacattggtcaagtttatgtagttatgtatgaatgactttaaaagactttgaaactagtgtgtgtttgtatttttagtaacttactttttaaaaatttgcattttaggtgggggtcacaccaatggttgttggttacattctgcattccctttaacactttattttatatattaaaagagtatttatggggtgcagtcatgaaaatggctaccagttaccaggtgcctcctatatgccaggccttatgttttgcactcttcacatatgagctcatttaatctttctgcaatctctcaatgtattattatcctcattttactgacaaagaagcagaggcccagaagactaggcaatttcccccaggtcacaaagctattaaatggcaaaggtgagaatttgaatttaagtttttgatccataatctctgttttgactccaaaacccattatacaccaccaccaaaataatggatgaggctactattttgatattgctaataactggaagtgataaactaagacacagaaccatattttaaccagggtttgctgtctggttatttttctaacactgttgcctctgaagaaaaggcaggtaaataatgtgtgggtgtgtgtgtgtaaactagtaaatttcacctaatttatttgcatcctttctactgctatttctaacccccatttttgagactatcttaagagtcattgtctagggatgcagctacttaaggagcaaaacggtcagggtcatttaaaatctcttaagcagagaacatttaaattttcttgtttctggctactggtaacaaatcttcattaaatcttaaacacagaataaacaaagcatgaacagattgtgactgcttcctaattcaacaaagagagattacggttttgcagatactgttaaatgttggaacagaccctgtggaagtcattttaaggcccagagtattttcatgtattttggcctctctaaatcagtttttcccagaggaactgacattgccaaaaaatatgcattttgtttaaagttgtctggacaaagatttatgcttctgtgaccatctgcattatcacccatgcaaggcaatcaatactgtcctaatccagtcatatgcctactgatgctttatgtatatttcacatacctatctgcacaagagaaggaagtaattgcacagataaggaaaagcaaaagtagcaggacccagtttgagattagatcctttgactgctgggtccagacatggatgggtatgggaacccacctggggtctacttgaatgagggagaaaacttacccagagagaatccaaattagaatgtgcaagtgtcaaagcctcattctactgagaagagaggaagctttgagtagaaacatctagcttttctttggacaggtcttagatttatttggagacatctgttatggccccttcttgctttattttatggttccctattcacttgacgtagtccatgataccaatatccctcttaaaatatagccatcctccaaactgaacttgatacgtaggtacagccagagtatgatggcaattactgacttttttttttaacttacaaaatttactgttattaatgtagcttaagaccttggctttgcttttgtctccatagagagttttagttacctaaagcctccacgtatttgtaattcatatttaggccttgcaaagatgctcattgttctcaaaccatgattccaaacttagctgcatattggaatcacctgggaagtttcaaaatagtttcctgtatctcactgccagagagggattttgtaggttcagagtgtggcctgggtttggggatttttaaaagactccagatgattccaaagtgcagggaaatttgggaaccactgttctaaccttccaattcaaagtgtggtccatggcactggcatcacttgggagcttgctagaaatgcagatgcttgggctctactcagacctactgaactagactctgaattttaacaggctagctaggtgattcatgtgcatattcaaaaactattaatataatcctgattacaagacttactttgaaattttattaaattccactttttttcttgagcttcaagaagaagctacagtttcatcactggggctcagaccacatgtgaagcaactgggttgggtgtcctcaagtgggtagggttaaggctggtcaatgataaacctggcatcagtattagacattcaggctaattctggatcaaagtgaacacaggaatcagaagaagattaaaatatagttttagctctttgcttgcaaagctgggctgaagacccggatggaatgggctgttccttgtcctttgatttcccccgtctcagctagttagtttcttgagaggggagagaacagaggcctctgctatgaagtggggaggtcctgcctgcaccttggtgagcttgcccccacatggcaccactggcagagaggagaacgtgttctgcttaagaacaacttcagaggaaggacagcgagcaaggtgacagctagctgtagaagtcagtgaccattcgcctgccttactggcccactgagtcactccttccactgggagggtgggcatgtagtttcctggcagctgttgctattctagggggcacagtggaaatgtaggaagaggatataagtcttttacctcatccctttttgttgattgggaccagagagcagttacctggcaggcctgcccaggaggactggtcagaaggcctcagaggaggaatgagacagaagagtgagccagcacggggcctggttgatgggttcagagaatcagagaaagcagctcaaagagcagctgggctcatggtcaccaacttgccttgttcccaaatgatgttagcttcctagtgtcttcttttactcagagagttgagagttgagatttcctttggtttcttgaatttcagacaggtcactgaaggtatttaagaatcttacttatcaatgggtggaagttagtaagatggtaggtggcctttttttttttttttttttttttgtagagacaagagtattgaagtgcccaggctgttcttgaacatctggcctcaagcaatcctcctgcctcagcctctgaaagtgttgggatcacaggcatgagccaatgcacctgcctaaaattatatctcttaaagaagtgatttgtctttcagagatactacctagagaggcgccaggagagaaagggcaataggcagttatttagctttccccttccatcagttctggaacttagtcattctctcgcgtctcatttttcctctaactttcagatgtgcaaaggatgtcttaaactcaacaagacaggagaacagaaaatcccaaacaacccaccagtataaaacacacaaatgtaacaaacacaagaaaactcaatactagctcctctttctccagccaaactgacaatctgcttgttggcagatctctgaaacgtggtcggtgctcactggcactacttcctcaccacagccttgctctttggctcccagcatctggcccctcccaaagggctcaattgaaacctgtctcccaaagggaacatgtggcgtcctcattgccaaatccaaagccgtttcttagctcccgctccatttaatgtctttctgaaggtcattcctttgacatcgttgactatatttcatttctttctcttctggtgatcaaatgcatgagcttaggaatcagacagatctgaacataaatcctaactactgctagtaatgtgaccctgggcagataaaatacacacacacacacacacacatacacacatacagatgtgtatcttttattttgctctatagaaacgggatcatattttatactcttgtctgctgtttgccttactcacttaacagttcattgtggaactccttccaaaagagttggtgtagaactcactcattcttaaatattatggatgtatcacaaattattcaaccattcctctgttgatggatattccatttgcttcagacattttctactctgggttggtgatttcatcttatgggataaatccccagttgggggatggctggatcaaaggacacatgtatatttaatttacatttagtgggtatatttaattttaatagatgttgccagatggccttctaaaaaaactgtaccatttcacattccaccggcagtgtatgagtagctcttcctcaaagcattatagtcctgtttaattttttacaaacctggtgcatttcctcaactactatagaaattgagcatctttacaaacgtttattagccatatttggatgttgtgttctgtgaacctgctacttatatccttattcaagttacttaacctccctaagcttcagtccctttacaaagttattatgaagattaaataaaatatttatgtgaaggctttgcccaaagcctggcacaagtgacatgcttggtaaatagtagctgctgttaattcttttaaattcctttttccttatttagttaatcttcatcttcatacctttaaacatgtatctataagcattttccaaaattctgcaaactaatttttctctttgacatcttgcattctttctttctgaacatttcaattttacagtctctattctgttaaaagaccaatttgaacctctaatcttgacttgtcttttaacagcagaattgacggtttcaataccttgctggaccccacagatttatcttaccatctactccctgccccagcagcaaactctgcctcacaggaacacaacattcccatctgtgctcctgtattcctaaaggcacccttttctccaagacctatgggcttgagatcataaagtcatcatgccgccttgccctagacgttcatgtcagtagaaaagctccataaatcccctttacaatggctcttatagccatcctctctttcattgtttttactctagttcactccatcaacaacaatcaaaatagctaactaaccagtttttcctctgccagcgtctcactttttcaatctatttgttacattccagggaaaatcttctaaaacaataacagaatcatgtcactcactcagaaccatttatcagtttcttctattacagagtaacattctcactggccttggagaacactgccccaattcctttatgcaccgtatttttttcatgcccccagtctctttagtttctaccaacacgccagttctgatcactcacaagtgttttttgctcttctggcctaacagcctacaattcctcttccttctccatctgttggaattttatttattttcagagcctctcactctgttaagatcttccacgtttactcacctagaatgaatcaagtattctagcagtttcctatagtatcccccaatttaattattctgtaatatttattattatagtaggtcattttcacaattcttcttggcctttcctcaccacaagcttcttgaaggccagaatttactttttgttccttataatattttctttcttttctgtgtttcccaatctatttcttatctagtaacttttaagtgctcctttatttatttattttaattttggaataaatgcatgactggggttggagattagggaaaattgaatctggtgaaagaaaggagcgagttgtcttagattctcagaggtagcaatgggaccatgggactggtagcaatggtggccatgggactggtccatcccatagttgtcttttatttgcttcccatacagtagtaagtgaacacatgttttataagttggtcaacatttaccaatcaggatgttttatataagcatctggcttctcttgaaataaggaacatcagcaagactggattggcattcctggacggtatatggatggatgtgaggtatgacaaggtttctcttcaaacagcctgatcaaccttttgttctttaattcccagtacccctccccatctctttcttcttctttccttctttctgcctttactacatgcccaggcatgccacagcaccagtggcgttatcagcaccagctcatattcctttccttatttggaaaaggactggctctctagctcactgcagacgaccccttcccgctctcccctctctcccttacgtgcctgccttatctaaaaaaaaaagtttaaatatttagccaatcgggtctagcttagattgtgaggtctgatcccagccaatggggaaaggacacaggggcaggatttgcatcaggaataaaaacttccactctcctttggtctgtgtgccctcatggcaactggccatacgggaggcacccctctccacagaagtaaatttgctttgctgaaaaatcctttgtctgagtgctcgtttgcttacaactctgagctttatttctaacaatggagatgagcaactgtagccttccttgggttggcacagtctctcatccttgctatagcccccacctacatctcatacccatgaatattacctacgtgacacctatgggcatctgagtctgtaatcacagcactaactccatgtgtgaccctgggctggccaatggatccttgggcctcgtgttctcatctgttcatactttataattacacaactttagtttatcaagagttccttttatttgttttttttttcccatggatctcatgtttaagatattttctccatgaaacagcgcacctattgaacatatttacattgtttcacttacactgtcctctttttccaaaatgattcagattttaaacaatagtccagaattatctggttataattatattatgaaatctcataatttttatcatgtttattttgctaactaagcaacagttaaggcacacaaataaatgcttatgcactgtttgttgctattgtttgctggggtttttttagttcactgccttctatcccaatcacaagtccagtcgagttactgtgacagcctgacatgggcctctggtatcaatggctgggtccaccaggtctgacaattcctgtgataccattaggagccagtcagagctattacaatgctgagttgataaaattgtgtgtgtgtgtgtgtgcgcgcacacatgtgtgtatagagacttgagtagcatgtgtggtagccttgtcgtgaatgtatggataatgcttattattgaaataaccaaataaacaactatagaccgtaacatataaggtaaaatttgaaccctttccactctcaatctcattcccagttatttctttattgttttgaatgtaatggtctaacctttttctttcccttgtgtgcatttaaagaaactgtgaacatactataaattctatcttttgatttgctcttttctcattacttcacaatgtgaattggatatcctttcattccaggacattttcatctgcctcattcttcttaattgcttcctatcattccagtgaaggcgagtatcaaaaagtatttagctagtttcctgctgatagacatttagtttgtttccaatcctctttccaatttaatgatcagttttcttgatgaagaaggtggaggtaaaatagttattacctgacagtgtttctggccaaaatgctaactactgataggtatttgaaagttgactccctgtattcttgcaatatcctctgaattattctgtattctgaattatttgtaactgaattattctgtagtttactttttcctaaatgagaatctggacttaatattggctaccctttttattcataaagctaataactcaggttctgagcacttattatgtgccatgcgcatgctaaatactttacatacattatcccatttaatccttccagtagtcctaaaggcaaatactatactattatgtcaattttacagaaatgtagacaactaatttgcccaaagtatcataggtgtttaaggggggagagtttgaatacacacaaacccaagctagaagctatgctcttaactttgattgatgagagcacagggtctgttttctcagggtctattttcttccctgaatcctcgtgtatgtgaaactctaacagcagagtgaggaagagaagaaaggacttccctgtgtgctgggctaagagtgtaatcaggagcagactgttcctaaaaacagggttgtaggagcagcagtaaaagctcatttctgttacaactttggagacccctgtaatgctttcaaattagaaacttttattagtccatgttgtgttgctataaaggagtaaccgagactggataatttattaaaaaaagaggtttacttgactcatggctctgcagaatgtccaagcatggcaacagcatctgctcagcttctggagaggccacaggaagatttaacttatggcagaaggcagaggggagcaggcatgtcacatcgtgagagagggaggaatgagaaacaggggtctcttttaaacaaccaggaaagggcacaaactcatccataaggcaccccaccccatgacccaaacacctcccactaggcccccactccaacactggggatcacatttcaacatgagatttggagagcaaatattcaagctatatcaaagctctgcaccaaagctctatgctgatctcttgagaacaaatttatgcttgttgcagaaacacaggctatagtagggaaagctttggactctgaagctatagatttgctgtggaccagctatgaccacggtttcctccaccagaggataaggcttggatcttttggtctctgacgaaggtttttattttgaaataatttcagaattacagaaaatgttcaaaaatagtgcaaataattcccatttccatttaccttccacacagaatcctcaagtgtttacattgttccatgtttgttatgttgttctgtctcctctctccttacacacacacgtatgtgtttgagtttagtaaatgtcattatcatgttatttctatttcccaacttttggggaataagatatgaacataatgccctttacccctaaatatttcactgtatattaagaaacagagacactctcatatataactgtagtttaattattaacattaataatagtaatcttatctaatttatgcaccttgttcaaattttgccagttgtcctactaatgtcctttaaaataaaataattttcttttttttctggtctaggatccaatacaagataacatattacattttttgtcatttctttatagtcttctaaaatatggaaaagttcctcacaaaacgtatgtttgtcttttgtgactttgacatttttgaagtgtataagccagttattttctggaatatccctaattttgatcttaggatatccctaattttgatctgttcagtttttctcatggttagactcaggttatgcattttttcagggaatatcacagagcaatgttgtgtccatcttggtatatgacatcaggaggcaggcaatggatgtttatttatctcattacaggtaatggtaagtttcaagacatgatatggatggtatctgctcaatttctttcttataaagctattattatctttttgtaattaatttatatctttgcagacatactgtggagacataatgtaaatatcctgtttgtcatcaaactttttacccaatagttttagcaacaattgatgattcttatgtgaaacattatttctgtgttgcttatcaaatgagtgctgagactcttgctttacaacttttacttacaaagcgcttactgaacaataataaaaaaattttagtcacttcagtgccatgtagataagttcatcattcaacttggattagccatatttaactttgcaaggtctaattatggataccatttattaccgagattaagagtaaatatataagaaagatatagttcttaacatactgttactttaaatagatttgattagaaattttgctttgtgaaaaactactcaaacttccagtgttaaagatgaaggtcattcacattggaatttacactcttttaatggcttatgtatagttgaggtccacttacttgccaaattcaaacatttagattcaaggaagaagtccaactgaatttcatgattgttctcaaggggacaaataaaagaaatatagacattcagcacttcttggctacaaagttaaccctagggattaactttccacagcacacgtagcctgtgctctctccagcccggctttcatggtccctactcagagctcagcaactccactgaagtcttcaggaaaccactgaatcatttgggtcagactggcttgactgggcctccttgtgctttgctgttctcccaaagcatggaaagttttaatctaaacaatcattctttaactcatgagcagcttttcacctccccctttggattttgggtctgtcgcttctctgtcctatacaaagcaatgtggtaacaggcgtacccattaaaactcgtccatatctctacacatttagctgttatcattcctaccttacaaacagatggaaaactgcaggagataacttgtgtgcattggaagccttttctataacttctacaaagttatttttcatacaaactcatgtgttcaacaaccagttgagaaaaatcttatagattaaatgtgaaatcaaaagcaatgcagaatttctagaatttgcttcattgattttgtcaagttatacatctccaaggaaaagggggtggccattatcttttcctccaggtcctctcttcattctctcttccctctagcagggggaaaggcaggacttaattagggagggcactgatagctgatgattaccaaactaatgctggcatcaccctaattggcacctagcaccttgtgttgctgagtaggagaaatttcttcctctaatttgtgcttctgaagcatctacagatctggcaatttgccttgtcttcttttagtgccagcaagcactaattactttattatttgatttacttcttaatgaattggtgacttgatttaaaaaatacttattatatatttgcttggtatcaagaactaagctatagagtggaatacaataacaagacagaatatctctgccttaggaggaaacagacatgagacaaataaaatattataatattctatatagagtattacgggaccatggagaaaagaacgatttattctgtctgcaaaaataagagaaggcttcaaagagaaagtgatatttttgctaggtattgaagaacaagaggagttcctcagaataagaagcgaataaagattttaagtatgtacttagaggtatataaaagtatagtgtattcagacaaaggtttagagtccaatgtggcttaagctaatgccatttggagactactcaaagcagtaaggatagttaggtagagtgtagaatcagaatcaagactaatgcaggtttccatttaatgtctgtgttttactagcatagtatggccagattaatttatttagtctttctaaccctgtattatctcatctgtaaaatgaagataatactcatttctcagggttgttgtacagattcaatgggaatatttataaggtgcctggcagaaagcctgggaaagagtaactttttaaattattttattttatttttcttttactatgctttggtctacttcccctaccaggtagaaaggtaagaatggcaactgacgagcctggaagtagaattggggcccaatgttgaaagcctaaaatgccttgctctggggtgtagatttcatgcgtctggtcagctttctttcaacaaattagatttgcttgaagctccaaaagtctactcatttggtttcactccaacccaaacaaattccatttccctgagagctgccaatcatggctaagtgtatatctgatatctaaataaaatggttcactggaaggcatgactatagtaaaaaagagaatgatgcaactcagaaaagaaaaaagaatcttcaacaacaatttaaggaagtgttaatcagcattcaggaagtgaggattgagaaaatacatattgccacacacatgcatgaacttgaaggacaaaattgtgttagacaaattgagttagatcctcagtgattccaagatcttgcagaaacagagaagtcctcagataagggaaaggtgaaatccagtcaagcagagaaggggcttggtgagtgactttccttttacatcgcactcagataacagaaaggaaatttcatccaaacaggaagatcaactatggctagcccgtttgcactatatcccaaaggaacccatatgtagtttatgtgatcaaagacattcaggggaaatattagaatcttttaataaagaatgaccaataaatagtggtcggcattgtttcactttccatatgttttactgcccaataaaccaaagagaaaaatatattttcagagcagaaaggggataatagaataggtaaagacttagtaaagtaggtaaagtaggtaaagacttagaagaaaattgtaagaaatccaggtggtaaataaaatctatattttaaattgttttcttatgcatattttaggatccatgataaaaactatgcagtaatggttaacctgtagtattaatgatgaaaaaaaaggcataatttttaagaacgtgcagagaatagtaatgtttgatagcaaaaacataagcaaaaacaaaacaaaacaacaataacaaaaacccctttgcagataataacaggaaaatagttaagtaaattactatctctcatttggtagaattgcatgctggtattcaaatatgttttgcagagctaccatttgacccagcaattccattactggatatatatccgaaagaaaacaactagttctgccaaaatgacacatgcactcgcatgttcataacagcactattcacaaaagtaaagacataaaatcaacctaggtgcccatcagtggtggattggataaagaaaacgtggtacgtatataccatagaatactatggagccacaaaggagaacaaaatcatgtctcttgcagcaacatggatggagctggaggtgattatcctaagcgtattaactcagttacagaaaaccaaatactgcatgttctcacatataagtgggagctaaatatcgagtactcacaaacataaagatgacacaatcgacactggggactactagagtggggagggaaagggggacaggagttgaaaaactaactgttgggtactgtgctcagtacctggtgattggatcatttgtttctcaaacctcagcgtcatgcaatatactcaggcagcaaacctgtacatgtatcccctgaatctaaaataaaagttgaaaacaaaaccaaagtgaaattttaaaaaaaaattgttttggaaagtaatattttagtagccaaagagaatatcatcaaataatctaaataaacaaaaaaaattaaagagagataaagtgactacatataaatgaaaaacatgcatcatagaaaatgtaacaacgttaaaggaaaagtgtcagactagagagactatctttgaactattctttgaactatttattaaaactacttgtaggaatttatcctatatacatactttcatatggtcttaaaaacacatatgcacactcacacttttgagaagattgaacactggatatttgacatgtagaaattggtgttaatttgttaagatgtgatggtgctatttggctttgatttttaaagtccttttttagggatataatcagacatatttgtagataaaataatacgatgactgggatttgcttcaaaataacccagtgttttaagggcttggggagaagctggtaagttcatagatcagatgatttgatgattgttgaagctttgtgataggcacagaatggtttagtactatgtatgctttttctacgtttgtgtatgttggaagtgtcctataatagaattgtttaaagaaatatacagaaccgtgtatatagtatgcttctgtttacataaattaaaggaaatgtatgttgtgtatgtattttttcatttatgcttatgtttatataaaaacatagctgtaaggatagacaagaaagtaggaacagcagttgcctatcaggaagatagttatttgacttggaggtgttttaggaaggaaacttattgttcatggtatatatacatctactatttaaattttctaccagtatctgtattccattatatgtgtgtgtatatatgtgtgtgtatatgtatgtatatgtgatacactgacttgaatatacagacacacatacatatataataaaaaatgatttattcaagatattaatttactgattttctctagtacatgtattcatctatctatgcctttagtataaatatttgcatatatgcatgtttgtatttatacacatttatatatttatatgtttgcatatatggtgaaatttgtgtataaaacttttaaatattctcagttaagatcagaaaaaattttgtaatctgcttttatcattttctccttaatatatcagtcaaaacctgattttctgaaaagcataaatttcaaaagttttcactgaaaaaatggagaaattttgccttttaaaaaatgatatgcggccgtgtgcggtggctcacacctgtaatcccagcactttgggaggccgaggcgggtggatcacgaggtcaggagatcgagaccatcctggctaacacgatgaaatcctgtctctactaaaactacaaaaaaattagccaggcatggtggcgggcgcctgtagtcccagctactcgggaggctgaggcaggagaatggcatgatcctgggagacggatcttgcagtgagccaagatcacaccactgcactccagcctgggcgacagagcgagactccgtctcaaaaaaaaaaaaaaaaaaaaaatgacatgcaataactgaagttgatttcttactggagtaatgtgtggaatgtttctcttctgttttgtggaatccctcctagtgctctcaccttctctgggggttttcttctcatttctcttaatgaacaagtcaaggaataaggtgtgtgttgttgctcactatacttctgcctaccaccacctcttccactgggtgtagtggatggggaggctttgaaagagataaatgaatgtctatgtgtatgttggatactctaaagctcaaattcctgaatgtggcatttttccaaccaaaaacgcatatgagcagactaatacattttaaaatatcaattttcaaaaatattttttatttcatgactaaaactcttctgaaaatctgtcccataattgtgttattattttttcactcatcccacttattttgtgggtctaatgagatgatatttgtgatgcattagttaagttggtaataatgggtagctcttcatggaaataatgaatatctaggacaaaggtaaaatatcattaaaaggtaaaatatcattaggaccagtaagttttacccagtgtcctgttgaaatttacatggtgagtgatgtcagcaaaaatggtggaaaaagtagtttcaagggcctgttgcttttggaaaccaagaaatcaagtaaaagctgtcagaatcaactttgtcagcacgctggaaaacagtcaaatgtttacagcaaccaagtgaatgcttaatcgaaaaagaaaaaaaaaaggcaactttaaaaatgagcggacaggcacagtggctcatgcctgtaatctcggcactttgggaggccaaggtgggaaaattgcttaaggtcagcagtttgagatcaacctgggcaacatggcaagacaccatctttacttaaaataaaataattgttaaaaaatgatataaaaacttcaaggtacttttacataccctttctatactcccctacccggcttggtagaatttttgaagcccatgttcccagtgtgagaccgtgtccctgattttgtagggagaaagcaagactttatctattcaaacaaatcttggggcttgcctgagggactgatgcaagttgtttgtctttattttgcctaaacttgaactcattcagggtgaaaaagcagtgggtatttcttgaaaatattatagggtcaatgaacaacctccagccacctggggcaaaaggttgtagttgaggcaaataatgaagaactgaaatcctgggaggaaaaactggaaagatagtttatctgggaaactaaatcattcaaaagtgtctgtatatactggagagattaaaaaccacatgcacacccagtgcaggacacctgttagaaatgacatgagaagaccttgagctatcaactcatgctgattgctaggccaatgcaagcaggaagtgaaggttaagacagaattttaaatagcatggctaagcaatcaaggagtgccctaacacagagctaatttcaccagatgatttcaataaaagattcaagtaggtagaagaaagaatcagcaaactggaagtgggtcaattaaaatgatctcatttgaaaatcagagagaaataagaatgaagaaaagtgaacagagcctaaaaaacctgtaatatgtatgtatatgtaatacactgacttgtatatacacctaaagcatattatcatgtgcatgattggaattacagaaaaataggagagagaaaaagaggcaaaagaatagccaaagaaataatggccaaagctctccatatttggtaagatgtaaaaatccacacatataagaagctcaatgaatcccgagaaggatcgacacaaagagactcacggtgagacacattataaccaaactgttaaacactagaaacaaagaaactctgaaaagcaacaagggagcagtgacttgtgtccaagagatgctcaacaagattaaaagcagatttctcattccatggaagccagagagagcaaaatgatatatttaaagtactcaaatgaaaagacagaaacaacaacaatcaaccaagaattctatatctgacaaaattatccctcaaaaatggagaaattaagacatttacagatggacaaaatctgaggaagttaatagtagacctgccctataggaaatgttaaacagaattattcaggctaaaatgacagtaagttgaagtcatatgtagaaataatgaactctggtgaaggtaaatgcataggtaaatgtaaaagccagtattattttatctttggttaataactcctcttttgatttcttatatgatttaaaaggcaaatgcacaaaaagtataaatatatggttaattgcctcacagtgcataaagatgtaatttgtaacaataacaacataaagcaggcaaaagctgcatttggacactctttttatctattgaagctaaattgatatcaattcaaaatagattactgtaaatttaggatgctaattataattcccacagtaaccactgagaaaatatctttaaaaaacacacaaaaagaaataaggaagaagtaataatggcacactaaaaaaaaaaaaagtcagttaaccccaaaagaaagcaataatgaaggaaataaggaacaaaaaaagtataacatatacagaaaacaaatagcaaaatgacagaattaagaacttccttatcagtaattattttaaatgctcatggataaaattttcccaaaggcagaaatggtcagacagataaaaacacgattccagagattactttagatctaaagataaatgtgggttcaaagcaaaaatatggataaagatattccatgcaagtagtaaccaaaagaaagccagggtggctctactaatatcaggcaaaatgatcttttagtcaaaagctattaaaagagagaaagaaggacattaaatattaataaaagagtctattctttaagaagccatagcatttataaacatataggcaacaaacaacagagccaaaagatatgaagcaaacactgatggacttcaagggagaaatagatagttctacagtaactattagagatttaaatatcccactttcagtaatggatagaacactgaaatggagaccaagaaggacatagagaacttgaatagcaccatacaccaactagacctgacagagattttgaacactccattccacaacagctgaatacacattcttctcaatttcttctgggcctgtttccagaatagaccatacggtaggccacaaaaacaattttcaattaatttgaaaagactgaaatcatgtaagtgatcttctctgaccacaatgacatgaagttagaaaccaataacaacaacaacaaaaaatactggaaagtccacaaatatgtgaaaaataaaattaaataacacactctttaataccaataaaccaaagaagaaatcactctggtaaattgcaaaattcctaaacatgaatgaaaataaaaacacacatacacaaacttacaggatgcagaaaaagcagtgctcagagggtgacttatagctgtaaatgccaacattaaaaataaagatctcaaatcaataatccaattttgcactttaagaaagtagaaaacaataagcaaactaagcccaaggcttgtattaaaaaaggaaataataattattagagcagagataaatgaaatagaggatagaaaaacatcagagtaaacctggaggaccttgactaattcccctgactaaacgaaaatggtgatatttctatagacctacaacaaaaatatcataagagaatattcgaactattacagaacagagataaaattgacaagtctctagaaacatacaatgtagcaaaactgactcaagaagaaacattagtattagtgttctccagtgaaacagagctaagaagatatctatatctctgtccatccatctaatctatctatctatctatctatctatctatctatctatctatctgtctatctatctctatcaagatatttattataaagaattggttcacttgataatggaggctgaaaagatccaagatctggagaaccaaaaaagttgagaatataagttccagtccaatggctttttgagtctggcaggcttcagactcaaaaacaaccagtgtttcagtttgagtctaaaggcagaaaaatagcaatgtttcagctaaaggtagtcaagcagaagggtttctttttatttagttttttttgtactgttgaggttttcagttaactggttgaagcccaagcacattagggaggaaggacagtctgcattactcagtctactaattcaaatgttaatctcatccagagacactgttacaaaaacacccagaatgatgtttggccaaatgtctgggaccagtcaagctgatacataaaattagccatcagagatatagttaataaaactaaaagttagatccttgaaaagatcaacaaaattgtcaaatctttagcaagacgaagaaaaaaacagaagttgcacttaattgaaatcagaagaaaacagaagttgcacttaactgaaatcagaaaaaaatagaagttgcacttaactaaaatcagaaatgaaagtggtgacatttctatagaccttctaccacgaaaagatcataagagaatatttgaactattgtatgctaacaaattacaaaacatggatgaaattgacaattctctagaagcatacaaggtagcaaaactgactcatgaagaaacaaaatttgaacagatttatataacaagaaattatatcagtaattaaacacttcccaacaaagaaaagcctaagaccagatggttttactggtgaatctactcaacatttaagcaattaacagcaatccttctcaaacttttccaaaaaatggaagagggaacatgttctaactcattctatgtggccagcttatcctgataccaaagccagacaaagacatcactagaaataagaaaattatggaccaaaatcccttatgattatagatgaagaaatcctcaagaaatactagcaaactcaatttaatagcatattaaaaggattatacattataactaaatgggatttatcacagaaatgccagagtcattcaataagataacagcaatcaatgtaatacaccatattaatagaacaaaggaaaaaataattatcttaaccagtgcagaaaaagaatttgacacaatccaaaacctttcatgagaaaaatactcaaaaactagaaatgggagaaactttctcaacatgttaaaggacatttatgaaaacctgatgattaataccatggtcaatggtgaaagactgaaacctttctctttaaaattaagaacaagacaaggatgtttgctttcaatattgctgttcaacattgtactaaaagttccagacagaggatgtaggcaagaaaaaataaggagcattaaaattggaaaggaagaagtaaaactatttctaatggcagataacatgattctctatattaaaaattccaaaaatccacaaaaagagaaaactgctagtgttagtaaacaaagtcagcaaagttgcagggcacaacatcaatacacacaaatcagttgcttctatataccagtaattaacaaactgaaaagaaaattaagaatatacttttctttagaataagagcaaaggaataatatatgcaggaataaatttaaataataaatgaattgtacacttaaaacaataaaacattgctgaaagtaattcaagaagctataaataaatggaaggcatctaatgcttatgaattagaagacttaaaattgttaagatggcaaaaatacccaatgctatgtatagattctatgaaatccctctcacaattccaattgtccttttttgcagaaatgagaaagtcacctactagaatagcattaatccaaaatctgaaaatagcaagtgttggtgaagatgtggagaaactggaacctttatgcaatgctaatgggaatgtaaaatggtacagcctccgtaggaaacagtttggcagttccttaaaaggctaaatatagaattacatcatcccctagaattttcacttctaggtaaataccccaaagagtgaacaacaggaactcaatcaatacatgtgcattgaagcactacgcacaatagccaaactgtggaaatgcatgaatggagaaattaattgtggtatacaatggaatattttttagccataaaaaggaatgaaatactgaacatgctatactgtgggtgaacctcaaaaaagttatgctaagtgaatgaagccagacacaataggtcccatattgtataatctcaattatatgaaatatctagaattggtaaatccatagttatagaaattagttttttcattgccagggggctgtaatcccagcactttgggagaccgaggtgggcggatcacctcaggtcaggagttcgagaccagcctggccaacatggtgaaaccccatctctactaaaaataaattgctgagcgtggtgactcatgcctgtaatcccagctaatcaggaagctgaggcaggagaatcgcttgaacccaagaggtggaggttgcggtgagccaagattttgccactgcactccagcctggcaacagggcaagactccatctcaaaaaaaacaaaacaaaacaaaaaacattgtcaggggtttagaggagggggaaatagctaatgaaattattacttattgagtaaggaattccctttggggtgacaaaaatgttttggaactagatagatgttcacatagttgcacacattttgagtatactaaacgccattgaatccttcactcaaaatggttaattcatgttcttgaatttatctgaattgatacaaaagtaaacacaatacatgtcttctttacttcagcttctgtttaccagactacttggtgagaggaaatagattcttagagtctgacagacctgggttcaaattcctcattcattcattttatccatttgataagttaagatataaatatcaccacaacaaattgttgtagggattaaataagataaacaggtgcattaatgaagggtaagtaatactagcttcaattgctagtgtttctttctaatgcagcagtccattgtgggtattcctgagtagggaaacattatctatggtcatcaggcacttactccttaggtccctgtagtattcttctatcaaccagcaagcagagaaagacatggtagatctcttatggaaagttgttatgagatggtactggataatggaatacatcacttcttttcaaactccactgatggtaactcagtgtcattgccctgcctagccacagcagaggctgagacatgtagactgtgtttcaggaagaagaaaaagatttgggtgaggaaaaaaacaactcttgaggtatcgtacttgtatgaagcttcttgttcagtttgtgataagcacttaataaatatgaactctcttctttgtgggtaagtgagaatccctggcagcttctgcaaagttgtttcaaaatgcatgccatcctgatgacaggccactcgttgtggccttatggcaaagtcagttgatagggctgccaggcagacagtgagcagaattctttctggactctgttcctgcttgttctttttttcttttgtgttttggaacttcccttgactttggtcccatttagtttcccaatgtctaacttgcatttacccttctttcacagcttgctcacctttagcttctatctgactaggtctttgtgttttcattttgccctctcaacaaactatttctagtccttagctcagtagcttcactgagcaggcccataaactcccttttgccatttccacttcccagtcatatcttgaagacttccaacttaaacacattaatttatgcttgggatgattgttaaaatttctctattcctacatcttgtaattagcttagctgatttttaaaacaaatcctctaagaattatttttatgaaggccatctggtaaaacaaattaatctccaaggaatgttaatcagactaattgctaattaggtgtcctccttgattctattagttatagattggaaagtgtttgtcatatacattaatttttgcaaagatagtgagaaaacattattttttgccctgcaagagaacaagtgaatccatttgcatgtataatgtatgtgtgtggtgatattaaaagatatccattttttgttgttgttgtttttttgagacagagtctcactctgttgcccaggctggagtgcagttgcatgatctcgactcactgcaacctctgcctcctgggttcaagtaattctcctacctcagcctcccaagtatctgggactacaggcacatgccaccatgcccagctaattattgtatttttagtagagacaggtattcaccatgttggccaggatggtctcaatctcttgaccttgtgatctgcccgcctcggcctcccaaagtgctgggattacaggcatgagccactgcacccggccactacacacagtctttaaacttaaggggttgaaatttattctaattgttagtgtctcagcttcattattcctcaaatggttttgtggttcatggagcttcagaaatatgtttttaaacatacaaaaaaaatgccagtggattcaactcaatgaaagatggcaaatgagtttaattttatataccaatggtctgataggaattaccttgagtatattgtagagaatgcctgggtgggacggggatatttaccatgcactcactatgctcctctgtaatggactgagtagtgattcacaaaaatggagccacaaataataaaaaatcatttgtgctgaccctgaaaatgtgagcctcaaaataagacaaaattaatcagaaccagacaaactttaagggaaaccctagttctttattgaaatgtctttgtgccaaggtagttaagtgaaagaatggatgaaaaccaaaattcgtactctcccccgctcaactatttagcctgaggtaattattcacttatggaaaggagtgagtatttttggtcaaagtaatttaggttttatgaatgatttcttcctgtggttttatacatatttgtagagagtatgaatgacattctccctgaatttgtcttctatttagtggtggattggtttcacagttgtatgagacttcagggatcttcctttttcctcttttgttgtgaattctctttttataatagaagcatgaaaaaagtctgcctattagaaatgtgaccttggaatccatgaatccatgaatccatatttggaatccatatttataagaaatgaaatgtggtatcaaggaaggaattttgtctggaaagtcagatctgaattctggtcctgcctctctgtcagtgagccctgtggttgtggctaagttgttccatggtctctaatgacctcaactatgaaataagagcttggggttcagtttttaggtagaataatgctgtatgttgatgttgacattctgccattctgcagtgatatattgcttaatttgcctttgccagttattgagcacgagggggcagtaattggcagattgccccctttatttcttcttgacaaacagccaaattttttggcagctgggaattgttattcttcaccatcctgccatcactgacagatgcatttgacaggaccattggcttgcaatgccattccactcttacaagtaaagtctataatgcttaaagaaaaataaaaacatatgatattcaacttttacaaaagagtacatataatattctttatctgtcaatgtaaaaatggtcagaaacttttcagatatatttgattttcctttccatgaaggcttcatttttgtaaggatttttaaaaattaatagagaaaaaaaccccataaggactctcaaaccagtggtctaaaatggaattaattttgtccccatcaattgctatttctttgcaaatatttcttatcttggtgaatgatgaaccatttagcctctgacccaagccataaacctgttagttgtcccccttagcttttcttttcccacacccctccatcatcttgcattctgtctaattgattcagtaaatctggttgattctacttcttgtgtatttttattatttttcctttcttctccactggaaacttttatgactctagtttatactctcatctaggtcactgcctatgtccctaagttgtatccccagtgtctaatgccatcacactccctcctttaccctcaccccaggctacacttgaacaggtagagcagggaatgccatgtagacctcatgtagccaagttggaggccctttccagttcatccccttgactttattttaaataatacatgaataggattgcagaacttttttttttgttttctgtgatgctcatgcttgtgcttcttctgttcaatgtgacaaggaacaagatctctacaatgaattgtaccaatgctccaggaaatacttgccccatttttttttaattttagtttggtttaattcctctaaagtaacatcaagcaatgtgctataaaacagaaatatgtcttgagagatagttattctctctttctctctctcaatttaaaaagggttcaattttttactgcttcaggcaagtacaattttcacatactctgacatctcatgaaacctatagccaaagatttaggtataacctgaattcttccccttcagctcagtctttgattgtatacatgctcatccctatcctcaagaagaagtttacatcttatctcctctctgaaacccgtatacaacaccccaattcagtaattttgctggggactcctaatgctcttcttgtttatatatatcagcagctaacgcctgttttgtatgagctttctctatatgtatcatgatttgccaaaaacattgtcaactctttgatggcatagaccctgcaattaagccctcagattcccttgtttaactgatggcccagatagcaaatgcttgaaattgaagtaacgttctccttagcctctaacctgtgtcatcacattagctgaccttaatcagggcattaaaaacacctaaatagagactggtggccttcgaaggaggtcttttttgtccttagaatttttaaataaatcccactgtcaaagtcatcaaccacaagggaagtagaaaaggtggtgttggtctttagcacaattaaagaacctattagctaaatccctggcaggccaaatatgaaggcaatataggtaagtcttattacactctgaaaatcaggattaaatatttacaagtttgcataacttgacctttcttgcaaagagtattaaaactgtttttaaagaattccttctgctcctatgtaaaagggcattcataaggcctccttccacaggtggacaaagtgttcatctttggacttactgataaaaattttggctcttctgaggtagtagcagagacagggtagtcagggtagacagggtagaatgctaactgtatcctcaccacctgacaatagaagtttaaagatgtaaaagtatgataacatacaatctttcaccccattggtccttgttgtcaatagctctggatagctaggaatgtatttacttccttcttttgccagggttcattatttgtaccttgcaaatctgaacatttggccaaagtctatgaccttttgaggtacaaggaaatggatttttagttaagaatatttacaaaattaaaattacaaaaccttgtcccagctaaagcttgaaacacatctgtgtttgttcacagcttgtaacatttgaggctccccatcatgttaaatccttcctttttattttaaagtttgccttctcatatgccattgttctcctttatatttgagatgatggtctaggttttcagacagctctgggaaggcaggtgttaaattttaagctagtgcttggtaacctccatggtgaaatatgccactgtttaacagatgactactgtgctgtggacagcagtgccccaggagagaggaggtgtttgttccagaatctaatcaagctatggcctgtctgcatcctaacttatgcagtgtaatcacttgtatcattcgtggcatgtcttccattaatcagagctagtgcaggtaccaagggaacaggggttccattagcatgacatatggtggccttcccaaagttttggatgttttggaagatggttgcagggtttgtaccagtcatacaagagctgcttaatgacttagatattagtaaactttttcccaggcatttaatatcttccccgtttcctcttagtaatcgtagttaggttcttgatgtcccctgtgacatttttatatccatcaccttcaggtccaaactgtttgatttgctgcttcatcttggactcctcatatgtgcttctagagaacaagtatataaaaaagaaagtatgttttcttaattgcaaaagtgatgaatgaggtaggcaatcaggactgtttttcatattttcagagatgctgaaaatacatttagatttgttttcagaacaaaatgagaaaattgttttggaaaaaatgttataagtttggttactttggaaatgtcttcataaatactcatcttgataatataatttatctttgctagtctcatataacaatattgttgcctttaaaatggaaatttgtaagaagtttaaaattccagctttacatacagccccctttaaacctccccaggcattcatagatatgttaaaatatatctaaaataatactaaagcattacatttttttaccttattggataagctaatataaaagatgttttatccatttcacataattttaaattttaaaaatatgaagaccttatgttatttaaaatttattaacaatttatacactcccttctcctgacaagtccccatatattcttaaagataaattccctataaccattttttaaagtaaatggtatatgcttctatctgtcttggctatcacgcatctatcttggaagaaaattgttgggttccaggactgaatattgtactcacatttggataagacaaggatggggctctaagaaaaaaagcaagagagagttgtgtgcatcacaaagatgatgcctctcccgtgtccccatctccaagaccaagcatatacagaaatagccacaggtggctagagaaggaagaccagaagacatccaggagcatatggcaaggcaggaactattccacattgcagggtgagggaagagttaaactggtggagagcaaatcagaaatgcggtgaattcccaaaatattgggacaacaacaacatgactttggctattgtaggggatgaaaataccttttccacactcatcttaggttcatggctgaagcccctacaacaaaatacagattaataagagaaatgtgtatgaatttatttaatatacattttacgtaatacagaagccttcataaggaaatgaagacctgaagaaatcataaatgtttgtatttttttgctaggtttgacaaagagtggacactcacgggcatgtatgattggaggaaaaaatgttttaatctaataataacaaactgggagaaacttagaaaggcctatttgttcagattactttctgtgtccttgtgtcttctgagataagaatattccctttttctgggtacagggattgcacctctcacatgatggtcacgtgacttcacaaaggcgaggagaaggtgagagtgatccccttatttgtccattctcatgctgctaataaagacatatctgccactggataatttctaaaggaaagagatttaactgatttacagtttggcatgactggaatcctcaggaaacttaaaatcatggcagaaggggaagcaaacacgtccttcttcatatggtggcagcaaggagaagtgccaagcaaaagggggaaaagccccttataaaaccctcagatctcacgagaactcactcactatcatgagaacagcatgggggtaactgcccccatgattaaattacctcccacaacacatgggggttatgggaactacaattcaagatgaaatttgggtggggacatagccaaactatatcactgccccctacttctgctgttttctcatacaccagcatgccatattttggggtagtgtgtcctgaaccccatcactatcatgtgatggatgattgggttatatattctatccagcccttactctcaacctgagatagctaaagttcattaaaatagatttttgcttctactatgtatcagggactggtctaggtacttgacacatatcagttaatgaaacagaattatcactatccttgtggagtttacagaaaataagcagtaaacttaacaaataactaaattatatagtatgttaaaattgataagtagaatatatatttttataaaatgaagatgagaaggatcagaagggtcaaataattggggccaaggtccaaggtggggatgtcactgcacagtatttaatggggtggttggttaggacaggcctcattaggaaggtaatagttagataaatttttgagagcagttagggaatttgacaagcagatacctgtggcaagagcattccaggaagtcagaacagtaataacaaagactcaggaaggaggccagtctggctggacactgtggccagagggagagaggaggggatgagtgccgaggtgcaataccacatctgatcatgtaagtccatgcaatgaccttgacttttactctgagtgaaacaaagcagttttagcattttcagcagaggagaaaaacactctgatttatgttttcaaatgaatccttctggcagttaaatgagaatagacatagagagatttttgacatcattgctacttgtctggagttctcattaagacacagacctagaattgtccccataaatatttaaatcagagtcaccaaacatgacctggtgtcaaaccacaacctggacagaaattaattgcattgcacagctaaacctggggtctccctgctggccatatcagtggacttgccctgatcattttcttaatcttacattaacacaccacattatatgcaattgaattccttagatgccacttattattttatggcagttttactgaatgtatcgaaacccttaaagatgttctttttctttgacataacaattacactcttagaaatttccttaaagaaaattatctaaaattcagaaaagaatgccaaaagatatttaccaaagtataatagtatataatagtgtgcgtatatatgtatatataaaatagtgataaattagaaatgatctaaatatacagcgatgaagaaatggttaaaatactatggtgtatttataaggtaaaacactatacaccattgaaaacaatgttaattattggaaaattcttatgaaataatgcaaataaaagtaggaaacaaaacatacagaaaaaatctaaaaggaaatgcagcagatgttagcagagtctattcgattgtgtaaaatattcttctttatgttcctctgtatttacccttcttccatccaccattttcaaattattttatgaagttttctccagaagataccataatgaaaaagcttagagacaatcccaaggtcaagttcagagtgtatgatagaggccctttggacttgttcagggtgagagtggtgtatctgtaggtgatttagggtgacgtttggaatctggagatctcagtctacatgaatacattgctcatctggcacttgggtaggttatactttcccaggtagttcagctttaaagaaatgatcatatcctttaaaaacaataccagtcaggtgcagtggctcatgtctgtaatcccagcacttaggaaggcagaggtgagaggactgtttgaacccaggagctcaggaccagcctgggcaacatagcaagaccccattcttcacacagaaaaaataaagtacataaaaataaaagtaatatcaaaaaatgaaaatacaatattttaaaacaaaatcttgaagtgaattcacaaatttttcagatgtgtgtttaaatacacatctttctccttgagagtctagcttctatgctagtggttctcaaagggggcttaaacttgttagtaatgcagataattttaggattctatccccgacctactgaaacagaaacgctgatggcaatctattggtggggctcaggcgtgctaccccaaaatgctgcacctttggcatttgagaaaacagcagacacagaggagggtcactcttactttttcctctcccttgtaaaatcataagacccttatttgagaggtgccttcgctatacccagaagaaacatccttatctctgaagacaccgggacatagaagaatctgagcaaacaggccttgctaagtttccccgagtttatcacctcctttgtccagtcatacttctccgggactgtccactcttcaaacctaagcataaaagtacacaagctaatctgtttctttgggtcttcattttctcatgaagtctcctatgtcatgtaaaacttatattaaataaatctgcatttatttaatatcttctttgtatggagcctccaccatgaaccgagcaatgggccaggaaaagacatcttttcctcccctacaacgtgttttaacaagccctccatgtgattgtcaggcagggctctaaatttggcaagcactgcttggtgttgagtattcagaagtgacagactttggtagactccaggctcagcaggcagccctgccttcagagcatccgtccatgaaaacggatggaaaatgcagaagggcctctccctatcagaaggagaactgagccccaatcaaggtgtagattagtggttgggcatgtagaggagggctgatggaagattataagcagaccatttccagagcaacaaaaaatgtaggactgcttcctatttcaagttctatttctagtaacccaaactgatgttagatgatcacagcaagaaaaaaaaatgtgccaaagctaattcaggaaactgccacctgtttggggtggggtagtcaatatcacaggtagaatggaagacttcctttgcacttctgactaatggattaaagtgacaaaattcaaactgggctgttaagtcattctctataatattgtggaatcgctaggttttataagctcagaaggcatctcaagtttagaatccaagagtaaaattctgttctcagcaagcttcttactgccctgaagtaatttctcagatgggcccacgtgtcttctgcccctggctatctcttacttgtggcttgcataaaagcctctacgtgcactgctgtcgttatttttttctttgaaaacggaggcaaaaatacttcagctttgatgccttatgaaaagagaaaatcgtgacatcttcttaatatgaaaaactagacaaggttgttaatatttaattgtctaagccagatgcagtaacacatgcgaatgtgttcataagtttggaacaggggatgcatttgatttactcttctacaactttccaagtgtattttcattattttacagaagctcatataaataactgataaaatcgacttgttaaaaaattaattggatttgtaatataaagaattctttttacccatagtaatatttgttcgttatagattttatctttaatttttaaacttctgttattttgaacctggtgaggtctacttggttgaactattaatgaaccacatgccaactaaagttgatgtgattctttcataaatcagtatatgcatttataatgcacatcaattttttttctagaagatactatgtgtgaaaatgtattaatttaaaagaattagttaacttcaaagagatgccttggaaattttatcttaaaaattaaaaaagaaaagaaaataaataactgagcttcagacaatttatgctcagtcctcagaacataagctctaaaccatataaaactttatttggtcagttgctcaaaatagtatcaaatgggaccatcttcccaaccagactttcttctcttctcttgcaaaacttctcttctcatgtcattttcaagaacttgctttatgaataccttttcttgtactttctgagagtatcagattgcaaatacatatccatacatgtatgcatatatgcaaacatacacacacatgcacacacacataaaacttctctagggtaattttcagatggcaaaacaaagcaactcttcctctgctcttcactctatacataattttttaaaatgtgttattcctgcaatagtagttaaaaagaaaatagtatatatcgacctgaaagtgtatctccccagctcacagaggggtcttatttcactatgataaaaacaaaattaaggttatagttaataggtgaaagcaaagatcttaatcaggatgagttcaaaatgctaaagaaatgggtattgtgtaggaaatgggaaaagtttgaactgatagtgtgggctctccagtgctgttgacatgggcatatcatttttgtccaggttaaaagaatatttaaatattcttttaatgcaaaatgcaaaaaatgcatttgctgctaaagtaatgtattatttaacatagctgaataaatccagttcaatcatttgagaagtgcacataataaaataatgcttcagcctaatcaatctaaggcttttatttactctagatctatacttcatacgcttaggaggaaggttttttgctctaaaaattaggcgcaagtaaaatttttcctaaagtatgaaatagggatctaaatttgggcctcacaggccagcattacaattataatatatgtgatgaattaatgtgattaatttataattgatttagataaaaacaagctttaaatatgggattcctaatacaaatgtacagtattcacattttactaaggaaagaggctgttcttacagcccctttgaaagaggccgttcctacagcccctttgaaagaggcctttcatgagacgatatatgacgtgaatattgttattatttattttggtcttcttacgtcagcatttcagctatcctttatagttgctttgatatatgtttcttctatcagtttgtgtaaagaagccatccctccatgacctttgtatgaatatgagtgtccttttctgttggggatagaagctgagaccacagatttctttgcacagcaactcagatcactagtccatgaagttagaatggaggagaaattactggcaggaaactcagaagtctgcctttagcaaggaggaagaggaagctcagcttctccctcttggcaccatttctgttagtctgagacctgtaatgtgtggttagaggtggtaaaacccaatgggtagatgctctttaggcttgagtaatatagaactcttgaataattggaagaaatgaaagtagagttctttcaagtaggaacacaaagctatttacctagagcaatggttcccagagtgcagtcctcagatcggcatcttctacatcaacctgatcttcttagaagtgcaaaattttcagccccactccaagcccagtgcatgagaaactccaggtatgggacccagcaatttgttttggtaaactctccaggtgattctgatgcatacttatatttgaaaatcatattctttagagggtcagtagcctcttttctgctgcctctttcagctaaagagcattcagcctcttaagctcagtttcatttcctttctcctcgaaagcgaattgtttccttgacaggtaggtagtttagatttttgaaatgcagaattgagagaaaggggaagagaattggatcagaactgagagagaaattttctcaagagcttggagaagatcagcgctggaagaagagtttcaggtaggggaaaatagacatgtagccatcgagtctgaagtcatctggggtttgaatcttggttctgccacttagatgatgcagggctttggtccacttatggggcttctctaggactcagtttcctcatatgtacaatggagataaaacaacagtaatttcctcaaaggcgtgttaggaggttcaattagttaatgtattatatggagtatgacacgatgttcaatatccattaggtatcattgctggatgaagtatattctattaattgtgttcagaaaaaagggagcaacgaatcacagtgatttgaactttactttttgattgctggactggttactttgcttaaaaaaatgctttctgagaacagaccacatgggtcacagcttcaagaaaatttcaaaaggaatatatttttccaagtagagcaatgttaaaagacattcagaatccaagacaaataaaatgctctgttattacaaagctattgtaggtcctcagttatcattctctctgctccaactctttgaaaagctcttcccaaaacagagggacacaagttctttgtcccctgttccctcatgagcaaactgaaggcttctttgcctcctagtatatgggtcttttatttctaaaactgacttcttaaagatgtcaactagctttcttgtgtgcaggtcttaaaacatgattccttcagcactggattgaatatccagtgaagatttctgtaataactttctaagttctttttttcctctatcatagagttccattggccaataagaagagcattttgactcaccaacatagatttttatttttgacctcttcactctattaatggcaaatagtaaaagattacatagtgtggtggaaacagcaagatatttggagccagacaaggtagttctgactcaacctctaattagctttttgacttaggaaagtcatttatcttcttggatcaattttctcacttagttcagctttcaactaggacaatagaaccttacagggatgaagagacaatcaagtgggggaaaaatgattttttttaaaaaaaaactgcaaagtgccattcaaatgttagctattgagagttaatgataattaacattcactgagtgtggatgaagagctgggcaccatggaaagtctcatatatacatatctatatttatttacaaatagatataagattattgcaatgtatattatgttcaatttgttaaatttacacagctagtaaataaaacttagaaaatgtaattttcttagctcatgtttaaacatttaaacctcgattagaaacatgatcagctttggtctgaaaataagagaaaactctgacacaatctgatgaaaccaataaggatacttgctatcgctcataacgtgaagttcagagagacagtggacgccagagtgtctttaaccatattcttatagttaccatcttttatgacaatcatcacagtaggctgtgttagaaatttctaaagctgggaaaggcttcagcagtcagagtctagactgttttcttacagcagggaaaatcaagattggagtttcaaggagctaactcatgatagcaccaggggatggtcccttcatccaatccctgattggaaaacaaccctaggccatgacagtggcagggacttagtttgcttagtgacttgctctttataatttctagataaatctgcattttgcttcactcttctctcatcagagaggttgagttcttcaaacacttttgttgttatttctcaattcaaagagcaacataagaaagacatgctcttactaggtcattccaaggtttttttttccatctattatatgtaatcagatttgtatctctgttgtagaaagtcttatttttctttatgtctgttaaaataccagtaggttctctattctgctaatgtaatatttcttttttttgctgttcctttgagctggggcacattttattgttttgtgttaattctgtgattttaagtctgtatatcaaaattgtagtcctactaggcatgtaaatattataataaatacattagtaatgcagacagcctacaaaatagtttgctagtttgctctaaagatatttctggctgtgataatgattaatttcagataccctgcatcataattttcttgaaatatgtaaattacttccctctcaaaatttcttatgtagaaacacacacacgcacagacacacatacacacacatatttagcaggtcgaaatgaggttcttgaatctgcacaaaagttgttgatgccaagcccaaacagtacaattgtgagtgcagctggtcaggtcttcaataccgttcccttctcctcaccattcttcatgcccaaggggtctatttgcatttcctagaacatgccttgcgctttctagccttcagaccttttctcccagtttgtccttcacttaggatgtcttcttttagtatctccaactaaatgaaccccaccctttcaccaatagggttgaaaatacattttctcaatatctcagacaatcccaggccagacaaaaccccaagggccagttatcttttgcatttcttgagcactggttgagcatcgtgttagtaaaattaaatgttaatctcaaacacagagtttgagaggaaggcattcctgttttgcaagtcattgtaatttcccccgcaggtagcactgtgcttttagatgaagctcagtaggtggaggcttaataaactgttttttggattgatggtatgattagaagtaagaagacaattttggcttaactaagagaaaattacaaactagaattaattgtgtgttttaaccaaaaaaaaaaaagaaaaaaaaaggtgtggaattgatcttttgtttactgtaaacatgttttccttttaaaacctttcacagagactgagtaattttgtgctatctctttgacccatcttttgcctgcaccctctcatctctttctgcatcaccctcatgaggggccaagctttctttttaggttgctctcttccttttcaatgtgtttatgtatttttcttcttagaagttttgggaagaattcagttacatttcaaaagtcttgctcttcagaattaaacctttagccctgtgccttttgattggctctaaaagtgcgtgtgtggcctgcggggacagttgtcagcgtggcatctttcttccagtgtgcccctctcctgcccttaagcattccatttttccttttaaccgtaacactgttgctttaagttgattttcaacaggtcttttgactttgatgatttcccaagatattgcatgtgtgaggtgaggagggtgtatgcggacttgttctttcctgggttagtgactagcctgagagagtttaaggagctaaacacaactatttccttgagtatgagaattatgattgaatatagctctatttttctccacccttgtctttgacatagtcttctcactttctgcatctttctgaaacatctataatagttttgaccctgaactttattctcttaaccagtcctatcaatattgtaccgttttgaagttaggaggtcataaagccattaactaatttggaagattcatcaatggctttgaagagctttacaaaatatgctgagtattctcaaaaatcaaatcagatcaagttagaattttaagaatttattgggcatataaagaacagtttgtgttttgttttgtttgttcggttggttttgattttttttcctggagaaaggttagtggctcccagagagtctagggcaaaaggctagtagggcctgatctaggaaagacttcttgacatttacttgagaggggcatgcaaaggtaaatcaaaccatttttttacacagttttagggctacttagtttttcttttaagattttctttaaacgtctgcataaaggttttatttatgttttaattgactaataaaaattacatatatttgttgtttacaatatgatgtcttgaaatatctttacattgtagaatgggttaatcaagctaaggaatgcatacattaccacacatacttatttattatggtgagaacacttaaaatttactctcaactttcaagaatacaacatattgttagtaactatagtcaccatgttgtaatgtacaataggtcaaaaaaaaagagaacagttcatgaattgggagactttgacatggaaacatgacatgagtctcaatattacaacaattacagtacagcttgtagaacatatagaaggaaggattttgatcttttttcatgattggttatatcatttttgaaggccattagggctgtttaagctcatttctctgtagctgtattggtttagttacactgaatcatgttagtaaaggactaaaagcttacgtttgtgttttgtttacatttcacgttagcctttcagggaaatcaggatgatataagttttggttacttgactataggcagttggccttggggtaggtaaatggtggccttcatttttatttatttatttattaacagtaccctctctttttcaggtgagctaaactatttatccaagcaatgcttatttctccctatctgcctctctcttctcttctcctcgctaaacacagacacaaaccccaattagactgtaatattacggtatagttttgattctacccatcgtgacttatgagacattgcttaaatacacgctcttattttttattcatccaaatctcctcatccagcttttcacccatgtttttcttcatatgctgatgaattcctttcccagagaatctagccaattcttttgaggctggctgctagctccctccccaaggcctccacttcaaagtgccctgctgccatagcggaaccaccaacaatctttttcaaaacaacctggatttttttttttctccttaggtctgggtatcaatcagacacagaggagctgatgagaactggtaacctaaaacaggatgctaagaagcatcactgacatttatctgggccttaatgtgtggcaggaatttttctaaggacttttccttatgtgatttcatttaatcatctgaataactccataaagtattattattattatcctcatttttcagatgaagaaacaggcctaggggggtaagttacttgcctaacgtcttttagtacaagatggggcttggattatgaacacagaggatcagcctccagaatttcagttcttaagcactctgccaaatggtgcattatacaagtaggtacacacccctattttcaaaccttgactggaaacacaagcattatggttcattttaaaatacaatgttaacttttcagtttataagcatgatgttcacaatttagatgatacactttggaatggtacactctgtatatttgggacatttcatttggcagccactgaagcttgttaatatcaacaactggcttcattggctccttcaaataaacccgtttaatctattatagctggcctctagcaaatatgccataagtagaaataaattttgagttaaagaatattcaccgtgattagaagctcaaaagaagtattttaaatgtgtgtgtctgtatttgggtatgtataaatagataggtagatagacagatgggtacatgatagatacctttgaaaacctttttcagttatgaaagcatttagtatatagtgttaatagaattttatctatcataggttaggtgtattctgatgttcagtttatgtttttaaaataatttggcagaaataaaagtattgacaggtggattgccactttggcaattttcactctaagacatcaatcgacaaagcaccaaacagcaaaacatattactcattgactggtaagtcataagccccagaggctgttgatcatcctggatgctggatgcttgcctactgtaggacagatggaagaactggctgctaaatcgtttctagcacttgacgcccagcatgattggggatcctgagcactgctggaaaaatatttctctagtaacttatcttgtgcttatcagtgaatttgcaagcccaagagagatctgttttgttgagatggcttctgaacaagtcaaactcatgtttccaagccaatttctaatactacacttgttattggatattacttgaaccagtttctgtttatggaacacttagaaaatttaattggaaatattcattttgtgattcaaagattatttattgtacttttgctggaaaggctgaaggtaaaagtatggctacatatcatttggcctgattttatgattcaaaaccaaaaaaagaatatgtcctgtaatatcttttccattgcaatgtagttttaataatgctgcagtgagtggattattgaccaacatttcctagtcctggagccacagagagaaataagtcatgtaggaaagccagcatggcctcactggctcccattatcttgattagtaaggtaggattgagggttaggttttctttcttttatttttcaccaggccccaatatgtgctttttcgtcctttgtcaacttttctttttcttttttctttctttctttctttcttttttttttttttttttttttttttgagatggagtctggctctgtcacccaggctggagtgcagtggcatgatctcggctcactgcaacctctgcctcccaggttcaagcaattctctgcctcagcctcctgagtagctggcattacaggtgcccaccaccacgcctggctaatttttgtatttttagtagagatggggtttcaccatcttggccaggctggtcttgaactcctgacctcatgatccatccgcctcggactcccaaagtcctgagattacaggcgtggaccactgcgcccagctgtcaacttttctttttaactctcctttgaatagacctaacccacattgttgtgttgaattttgatgatcaacagtactctgctcgggcttcctggatccagagccctgcaagagataaagtagcaacaggtaattacttggtgaacaggagatattgaaattgaatcaaatgtcctagagctctttccgccagactaacctatccccagcttactatggaacacacatagactttggcttttagcacccttccgatgcagtgcctttcttccctgattgcactgtataaaagctacaaatcatgcttctctgtctacactccaccccgcaaacacacacttttttttttttgccctccatgcttactattctccttctgttcacatggtctttcttcaaaatacagttatttatttatatatggtaaattttttgtaaagatagggtctcattatgttgcccaggctggtctcaaactcctgggctcaagcaatcctcctgccttggcctcccaaaaagcataaaattattttgaatagagagttgggaatgaaaggaattcttggattttaagtttatagtatttgggcttcttctataaatagctgatcccatatattatggaaagagaggttacttgttttattctgtaatgatgcatagacgaacaccacaccggacccatttcacaaagcacgtcctgcaaaaaccctcacatccacactcattcatattttctttggtacataaaacggttagaaagtattgacaagtagttttcacattttgattatgtgatttgctctttgtaacttttttttattattgctcacaaaataattaaacacattcctattcatgcagacaccattatcaattcatgttagattaaataattttaaaattaattaacttattaacaaaataatattatagtatcttatgaattgcctagatatggcattgttttgataagccaaagactaccccatgataacatgtatttaggagcaaccaagagaagaatataggaagtctccagagaattctatatacttgggcttaactatggtcaaagtattgccctgaggccacttttaaagcacatttctgattcaaataatggttttgacatatgttaaggaaaatgttggcaacaaatctagagatgaattgaagacttattcactttacaaaaatatttcttcaacatgcaaaagcatacacctctggaagtctatatttcagctttccctagtattgactagtagattcttactgagaaaaaaaatgaaagaagtaaaagtagatacatttaaaattaaggcattaagactatgcatggtggctcatgcctgtaatcccagctattaaggaagccaaggagagagaatggcttgaggccaggagttcaagaccagcctagacaacatggcaacaacctgtctctacaaaaattttttaaaaaattagctaggtgcggtggtgtgcacttgtaatcttacctatttgggaagctgaggcaggagaataatttaagcctaggagtttgaggctgcagtgagctttgatcacaccactgtacttcagcctgggcaacaaagcgagaccctgcccctgaaaaaaacccagtaataggaaaaaaaatacaattaaggcatcaaaagtgattgatagtttaacatgcctttaacctaaaagtaaaaaatctattacattataatgtaaatcaatagaaacatgtcatataatttacaaaatgttggtgaacatacacccttttgagacacatgttttctgcagatcaacgcaagttgcacaggtataactactgacaaatggcctccagaagttagagcaggcattgttaatttagggctatatgggttccaagagtcccagccaatgtcagactaggatcggtcaactcctggagttacgacttggcttgtattttgacattttttgtgttcattagttggaggatttgggtggcagtaggaatggaatctctagggtcagcatccctgtagtaggaatttgagtctgaaggaatccttgaatggatatcagtggatctataaaaactttaaaatcacggacaaaaatgtatgggatggggacaagccaataatatggtttaaatatttctaatcttttattttctggtcagggaaggtcttttattagcttctgttagattacgaccaaggatactcgattgaattgcaaataccagaggactaaattactgtaatatagtaaaaatgtgacttaaaacattaaatggattaaggagaaagcaagaaaagagtgaaagtggggaggggagttttcggaggggtggaacttcattggtggtacgggaatatatgtgaccttattatggaaatattctctatcacacacccaccttgaatctgtgtgaagagcagagggcgctttgctttactattatcttttttgctgtgcgatttccaccgtatcacttaatatcttccagttgtttcttcatttgtgttccttgtgttttgctactgacctcccttggagggatgttgtaaggcataaatcattaatgattataaagtgctttggaaatagaaagtattgcttcagtgatagcccagatgcacctaggaattgcagcatgaacagtacaaagcaaaaggcatgttgtcagaattccttttggggctccggatcagccaggccttccgctcacatcagggtgaattagggccatgaatctgaaagtacatctgatactgcttggcttgtacgtgctcttgttacaacattattttgacattttttgtgttcatttgttggaggactttaaacccttttctaaccaaaggaaaccaaagtgcctactgcaagcatttttcaaagatggtgtcactctgattgaggataaaaaattgatctactaaataaaaatgttggaatggcatgtttatcttacttgtttggccagatataagtaaggcagtgattcagaagaaggcttcattagaatgcaccatttatctaatactttgacagtcagtgatatcttctctctccctctgctgtctctctttatgaaaccaaacactgacctgtctttagcctacaatatcagatacaagaaaacagagaccaatggaagtaaataatccatcaagttagtgttaaagataagactagaaactgggtgtttcatctcccagttcagtacttctatatatctgagtattctttgatcatttctaagaagataccaagcagctttaatcaaacattcatccttcctaaaaggacctgagatttttattcaaagattccagaataccagttattcataaagctgcctgtccatgcatttagagtgtgatagagatcaactgtaacatccgtcatgttactacactccaagattgatttctgtggtctacttggtttgatggaaagtcccttcttcccttacagtctacatatctcctttaaatatgacttttatagatcgaggtgaatacatgattaactacattttcctcctattcatttatctatgtatagaaaaatgtgagaaaggagcaggaatctaaataaactcctaaattttcagtcgttgaggtatgcacagttcaaaagagatacttgtagactaaattatccagatgatagtaaaaattccctattttacattccagatgcagatccagcctcagtgatgaatacctaaatataattcccagtccttttatttcttatctttctccccaaggaacaggctcttcctcctactttggaggctcttctctctaatcgttttactagttcatgctcttttctccttggtactgtccaatctatatactctgttagattagaccatcccaactgagaaagcacagtgggatggagaagggagaaggcatggttcatttttgtatggacagttctgagtgattggtagggccagaaaaagctcttctgtgctacaggcttagggacaaacaaacactatgattgttaaaagatgttaaatagagcaatcaggggtttgaccgctcaaatgtagctgcaaccaggaccaatttgatgtgagctctgaggcccagtttttttcgtatagaaacaattatttttttttatgttctcccagagaacatcagccttgaaaacctgtttgtgctaaccagactcacagaggactgatttctgaatgtgagtgccactttattcaactgtaatgccactaatctagttttgcagccaccatggccctgccttttcacactttcttggtgttaatggatccaagatgtagaattagtgactagaagataagtagccatagaaaaagaattggaacagttagtgagttattcaatctgacctgtaatagagcctagaaaattattcctattcctctctgattgcccccttatgtcttagttggtcaggctgctgtaacaaactaccatgaactgagtggcttatgaacaacagaaatgtattcatcacagttccagaggctggaagcctgagattagggtgctggcgtggttgaactctggtgagagctcttttctgagttgcagactgctctcttgtatcatcacaaagtggagaacagagggatggagagctttctctggggtctcttttataagaacattaattaatgagagctctatccttatggccttgtctaatcttgattaccgccgaaagggcccgccttctaatgccatcacgttaggggaagggtttcaacatatgaattttgggatgacatagttatttaggctgtaacaccttataattaactgaaccatgtgtgttcattcatttaatatgggtttactatacttctcttatgtgccaattactgtcctaggttcttgtatttatcagtgaacaaaatagacaatgatctctgattttaattgtctgtatccagcagcccatgctgtaagagtattagaatattagttccattagggataggaccagcataatggatattgggcacactcctgttagtttcatgaatgaatcaaggctggctcctactggccaaatctgtgccctttgacatttcatttccaggctgtatatcagtgctattcaatagattattcagtgataatggaaatagtctctgtgctgtccaatatggtagccactggaaatatgtggctttgagaactttaaatgtggctaacgcgactgaggaattacattttaaactttacttaactttaattaattgaaatgtaaattgaattagctacacagagctagtggccattgtactggaaggtgcagtcctggctgatccacagcgccccagtgtctctgtgagattagagactgctgcttttgaaaagttgctgctcagaagacagtgcaatggaccattctggttgtttaggcatccagaaaccagactgttcctatgtcaatgagtaggagcacttgcttataataaataggaagttgcatagccaagtagggagacctagattcctggagatgatgtcaataggtggccacttatgcagatgtttactacttaggagatcttcaagggctcctaatgggatttcagctgtttgggaggtctgaaaagatgccatacataatcagaggtcacgaggcctggcctaaggtaaaaattttttttttttttaaacaggccacagtgcagtggcataatcatagcttgctcactgcatcctcaaacttctgggctcaagcaatcctccagcctcagccacccaaagtgctgaaattataggcatgaaccaaaaggtagatatctttaaacactaggttgggttttgggagcagaattcctgttcctggaaagactgttaagaaggaggcaagaccctcatctttgagaaattgtgacggggtggattttgagccctgggaacccatgcaggcaacttcccagagactagaactgagggatcaggaaagaggaagatttccagataaaggaacttattctcaaaagtatacagtgaacagcagcgaagttcacatattgttgagtccagtgagctgaactaggctctttccattcttcgttcatagagctggctgggctgggacctgggaatcagattgttccatctgttgccagggaaggaatgtgtgtgccgggggaaggaggaggtcacaatgtgttctctttgtgtttttagcaatttggtgtttctccttaaggatatttagcagaaggacatcatttcttgaaaaacactgcaatataaaacatgttataaatcctatcaaggtagcttataccttcagaggttaataggttaattctctccgtttacgatgactgtcctaagctttagttccttgacaccaaccacggtgaagtccagcagagatggaaacctgtagtgtgctgagtcaggagattccaatgggagtatatttagtctgaaatctctggggctgaaaatttaacattcaaagcaagtaggcaaagctggcttgggtagctgagtgcatggtcaggtgctagagagaaaagcagagattcagtttaggagaaccctgagaagttcattccagttctttccttgctgccttcacaactttttattggaccagttctatgccaggtgactctgtactgagtcattgtaaagtctttcaaggctacaggtaatttggaacttgcagctctctacatacttcaaattatttctcaaaaatctttagacttaaatgagttctttttctcaatctaccatttatatagccttattgtccaagatctttaatgacccttggcttgagtaccttcacatagcaaaggattctgctggagtatatgagttccaaggtatttttttctgatgaaaaatatctatcttggtttttacttattagaaatggaaatgtaagcactttgtactcactatataggccactggataatcaccaggttggtgcaggtgtgagggtgagtgtcagaaccccagagaactggttatgttttgaggatccatattcaggaacatataaatttatattgggaaaatgtaaatcaaaccacttgtactgaatgcttgactacactttcccatggtacacatcatcatttccttttaagacatgatcactccacttaaaattgtaagccattccttcatgtagtggcattccctgcctctcttctctgttttctccaagttttaatcacttataatataatatgatataatgtaatacagtataatataaaattcacttctttttaaaaaattgtcttatcactctttattaaaatgcagtctccatgcagaaagggatttttgttttttccactagtacatcttctaacttcaactgcttctgacacatagtgggcacacaataattaagtgttgaatgaaagaatgaataagtgagtgaatgaattttttggctgataggaatatacaacatatagattccaagacatgaaccttgtagatggcaccctgtatgagaatttctcaggattttccttgcaagtatgtcaaagactacaacgtactcaccaaccccatttcgccttccttctgggcatccaaccacacaatctttccatctacctctacatttgatgacactatgtgatagtgttctggccaattacatgtggatgcaagtgatggttgccacatcctggcctgaccatgagaacctgactccatggtccaccatgcttctcctctcctattaggcttgaatgaagctgagacccagggcatacttacatctctgtgatgaaggtggccaagtgcacaagaaggaaggttctgagtccctgggaagaaccatccaaccaggagcgctgccccctgccttgacacacacaattgagttttagcattagcattgttgtaataatgcaagaggtaaacttgtactgtattaagcctctgaaatttgaggtttgatcttttctagcagcaattaatgtttccttaacctccagcatgaaattttcatgttgattaaaagaagaaatcaagttttggaaaaaacactgctaaagaatatgagtgtgtatattagtctgttctcatgctgctaataaagacgtactcaaaactgggtaatttataaaggaaagaggtttaattgactcacagttccacatggctggggaggcctcacaatcatggcggaaggcaaaggaggagcaaaatcacatcttacatggtgggaagcaagagagagcttgtgcagggaaactcccttttataaaaccataagatctcgtgagacttattcattatcacgagaacagcacaggaaagacctgcccccgtgtttcagttaccttccaccaggtaggtaattgaattcccactacatgtgggaattatgggagctacaattcaagataagatttgggcggggtcacagccaaacaatatcattgtgttaccgaaataatctcagtgccctggtcacagcccattgtgtcagtttaaggaaaaaaagaattaactttaaaatacagagaaaaaaacattctgctttttctaatcagttaactgacatgctttcatttttatttttttaatgggttaatttccttcacaggacagaagcattaggctctggagaattttagcatgcacccagataatttcttttttaacttggccttcatattgctttcagaaaccacccagtgcgttgtgttataggaatgttttaaactcatggaatgttcgtgtcaactctttcaaatcaagtgtgccctcaagagagaaccaaaaatcataatcttttttcagtgtatttgctagaaatgtatcctttttcattcatctgctggagttttttatatttctctttgatataagtagtgtaacctgtgggccatgtgttattacctaggtaagctggcacactgtttttgtggggacactaatcttttacagttttttctctcccattagtttgaaatttgtagttctagcaatatctttcttggaacacacattaaggaaaattatgggccaggcgtggtggctcacgcctgtaatcccaggactttgggaggccaaggtgggtggatcacgaggtcaggagtttgagaacaccctgaccaacatggtgaaaccccatctacactaaaaataaaaaaaattagctgggcatgggggcacactcctgtaatcccagctactcaggaggctaaggcaggagaatcgcttgaacctgggaggcggaggttgcagtgagctgagatcgcaccattgcactccatcctggatgacagagaaaaactcagtctcaaaaaaaaaaaaaacacaccacgaaaaattatggtgaaataatggatcttaattatggagaatggaagggtcacagtagagaaactttcgaagaatctgttttcttcccctggaggtttcttttggggggacctcatcttggctggagcgagatgttataaggcagtgtccattcccctgcagccactcccaccctcttccatcctgaagcagtgttctcattgctgatagatgaaagaaaactgggacctccttgtccataaacttgaagtgagtctaaacgtgtaagattttcagcctgggtttcaaaaatgcatgtgaagaaaagtctagtgaacctgactgtggttaacttggagatttaattacctgagagaagagagagagtgaatacctttggctgccagaggcttggtacgccttgcttttggcatttgttttttcgtcattatagctttggttgctagtcttcaataaggctgcagtgatcataatgataatgttgttcacaggcaccctgtaagacctcatttacataggctaatagggctggagaagctcaagcaaaaattaataatgattaactgtgtttttatttgactttcaattgtgattttcttttttaattgccgatgcacttccataaatagagtcaacttttagttctcacctgagtgtaggtaaatgggaggaagtggtgagtggaaggggaaagccaaattgatattaaatattcccataacctttaatcacaaatgcaaattcgtgtttactcagatagggaattgaaagttcttgatgtcatatgggatcacgtattaggatttgagcattatgcagagtaatttgaatttgtattcatcaaaatactgtgaactaaatatatttaattgtatattattccagaaaccttcattttaaatctgtaggtacctaaggacaacatgttaaaatattcttgcattatgataaaaaatggtattctaggaatttctaaatagttttcattgaagcaacttagacttattactgattcttgatatcacagaaaaattaatgtgtataatagttgagattattattctttacatttctcccttgaactaattaactggtaacttaatttttcttctcctatcctctccatacattgaattccagaaatttataataatagcaaaacaaaaacaaaaacaaaaaaacctcatctgtaacatgagtaccatctagaataatgaaagaaattttacctgtatgatttaagtatttgccttcttgtaaatattattatggaaagtgttaacagaaatgatttctgatgtctaagcaaggactggttttctactttttcaccttgtagggtgggggtgggggcagtggtacaggggaagatgttaataagttagggttaagcaactcttttacagttacactatgacacaagagggcacaacaacacccctaaatctctaaggctggttgttgccataggctggagagcagagaggaaaaataactagttttagagacagataaactggagtttgaattccattttggcatttgcaagctatatgattgtgtgaaaattagttaccctttataacctttattgtattcatttgtataatagaaaaaaatattttaccagattgatgtgaatattaaatgaatgagaatttccagttgtctacctctgtgtgttgttacatatcaattccatgagagtaacacaacctgactccacaggaaagaacagtggaaacctcctgtttgagatctcccaggctcctccctatgcatcacttcaatgggttgagtttgatcagtgtcctttccctctaaaaagtcatagctgtgaggatagtagctttcagtgagctccgtgagtcctactagcaaattatcaacctgaaggtgtttttggggacccctcttcccaaacatgcagttggtattagaagtgaggaccttcttggagaatgtgcccacaaacatggctatctggctaacttttagcacaaatgaaaaccaaggttcttcactgtaccctctactaggcatgccaaacatttttttaggccaattccacagacttttcttggagaaacttgccaaaggtttagaagggactaataatctcaaataacatgtggcttcagaaccctgatacatctggtacaaacaggtggaagacattttagtgcagtgaaaatggtctaatgtgatttggaatataggcacagagaaaaagagactctgttagttggtgttgggtgcttaaattaggagatcatctggccttgaagctgaagctcaaactgaggcagccataatggtccatgtgcagcagagtgtagaaacagagaacatgaagaagaaaagcaacttgaagggagaaacagaaccagaagccaaggcttggcaggatgagagcagtgcagaattgatcactttacaggacttgcaagacccattatttctccctgtgtttccttatcataattttcctctgtctcttccaaacaccctgtacctaagcataagtgtgagggttttctcatttcttgtaatcaagagagtgttaatgaagacattctgaatgaggcttatgtgatttaaaaattgctacaaaagagaatgtgttaatatttatattcaaattgctaaaacacgtatcaaaatatctatatatatattccaaagatatcagaaataatttagaatgggggattcttttttcttaagtgaaaaatttaacttcagaagtatttaaaagaatgtaagaaatgcatagtaatacagcaagaatatgccattttacatatttttaaataatacattgcattgaaatactggtaatatcctttgttaaagaggttgtggtaaaaacataactctcaggatacaaaatcaatgtgcaaaaatcacaagcattcttatacaccaataagagacaaacagagagccaaatcatgagtgaactcccagtcacagttgcttcaaagagaataaaatacctaggaatccaacttacaagggatgtgaaggacctcttcaaggagaactacaaaccactgctcaatgaaataaaagaggatacaaacaaatggaagaacattccatgctcatgggtaggaagaatcaatatcatgaaaatggccatactgcccaaggtaatttatagattcaatgccatccccatcaagctaccaatgactttcttcacagaattggaaaaaactactttaaagttcatatggaaccaaaaaagagcccgcattgccaagtcaatcctgagccagaagaacaaagctggaggcatcacactacctgacttcaaactatactacaaggctacagtaaccaaaacagcatggtactggtaccaaaacagagatatagatcaatggaacagaacagagccctcagaaataatgccacatatctacaactatctgatctttgacaaacctgacaaaaacaagaaatggcgaaaggattccctatttaataaatggtgctggcaaaactggctagccatatgtagaaagctgaaactggatcccttccttacaccttatacaaaaattaattccagatggattaaagacttaaatgttagacctaaaaccataaaaaccctggaagaaaacctaggcaataccattcaggacataggcatgggcaaggacttcttgtctaaaacaccaaaagcaatggcaacaaaagccaaaattgacaaatgggatctaattaaactaaagagcttctgcacagcaaaagaaactagcatcacagtgaacaggcaacctacaaaatgggagaaaatttttgcaatctactcatctgacaaagggctaatatccagaatctacaatgaactcaaacaaatttacaagaaaaaaacaaccccatcaaaaagtgggcaaaggatatgaacagacacttctcaaaagaagacatttatgcagccaaaagacacatgacaaaatgctcatcatcactggccatcagagaaatgcaaatcaaaaccacaatgagatatcatctcacaccagttataatggcaatcattaaaaagtcaggaaacaacaggtgctggagaggatgtggagaaataggaacacttttacactgttggtgggactgtaaactagttcaaccattgtggaagtcagtgtggcgattcctcagggatctagaactagaaataccatttgacccagccatcccattactgggtatatacccaaaggattataaaacatgctgctataaagacacatgcacacgtatgtttattgtggcactattcacaatagcaaagacttggaaccaacccaaatgtccatcaatgatagactggattaagaaaatgtggcacatatacaccatggaatactatgcagccataaaaaatgatgagttcatgtcctttgtagggacgtggatgaagctggaaaccatcattctcagcaaactatcgcaaggacaaaaaaccaaacaccacacgttctcactcttaggtgggaattgaacaatgagaacacatggacacaggaaggggaacatcacacaccggggcctgttgtggggtgggggtagcggggagggatagcattaggagatatacctaatgttaaatgatgagttaatgggtgcagtacaccaacatggcacatgtatacatatgtaacaaacctgcacattgtgcacatgtaccctaaaacttaaagtataataaacaaaatacactcattcagtattggagattgtaatatgacactattcttttggaaaacaatttgacaacatgttttaagctgtaaataaaattatatctatcggcccagtaatcccactcctaggaacttaaatgtaaattttaaaaaagaaaaagttttaggcataaagacatacaatttaaatacaaaaatatgaagctactttattctcagaagggactagaggaataagttactttcactgaaattgatggattattatgcagccattacatgagaattattaagattatgtagcaacaagaaaaattgcttatattcatgacacaaaatgaaaaataatggagaatataaagttgtatctgtaccatgatagaactacatagtaatatgtactagtactaatttatcaattgtgcactagttttgtactttaggtgcatgatttactcaagtttcacaaccacactaacaggtgacactaatattattccattttacaaatgagaaatttagacacagacagtttaagtgacctgaagtttcatagttgggactgatgttctgtttcaacccaactgatctaatgccaactggagtactataatacaattctgatgcattaacccactggagttgacatcagactccacaagttaaaggctcagtcatccgcaagactctctttaattcagatgccatttgtactttgccatctgtacttgagcctgggaaggccacttgcacttataaccaactggctataaatatcgaggttcccacaaccccctcatgtatgttaatttggtagatcaactcagataattgctacacctataattacagtttattataaaaaatacagatgagaaacagccaaatgaagagacatacaggataaggttgggtggagggaccaagagcttccatgccctctccttgtaaaatctgggtgcatcttcccagcacatcaatgcatacaccacctggaaagctccaatgaaccttagtgtccataatttttattgaggtttcattacatagacaagattgattaaataattggccacatgattaaactcaatctctagtccttgccccttcttggagattaggctggtccaaagtttcaactctttaatcatgtggttggccttcctggtgaccagtcccctgaaataatctagcagctcagcatgagtgactttatcattaataataacaaagacaatactatcacttacgaaattccaagggcttcaaaagtttcaagccaagaactggggacaaataccatttatattctctattataccacaagtccctttcaggaattaggaaaatttattttttattcttgtgcaagcattaggcccctataaaataattatgatctaataaacaaacaaacaaacaaaaacactgggttctaactctgttctaacctttccaagctctagttctagtaatttacaagcactggtgttctcaccttcctgggctcagacttttcttctgtaatgactccttaaatgatattaggtgttgcttcaacttcctatcttccatcactcttggttttttttttctttgagcatggcttacattataattggatttagcccagatatcaggagtcactgggttcaaaccttatcttcatcatttgtaacctttgtgatcttgagccagttacttaacctcttggtgcctcagttttctcatttgtaaaaatgtgagaataatagtgcttccttcacagtattgctgagagaataagatgtaattatgcaggtaaagactttatcacttattctggcataagtatagtaaggactcaataaatgttctcaaaagtaatttataatgtatcaaaattttataggattttaagtcaaatctctccagtataaaagttgaatatatcaagggtctatagaacttcattcttgataaaaataccaggcatattaacaatgacctataatttaaacaatagccaggtgtgatggctcatgtccgtaatcccaacactttgggaggctgaggtgggcagatcacttgaggtcaggagttttgagaccagcctgaccaatatggctaaactctgtctctactgaaagtacaaaaattagctgggcatgatggtgtacacctgtaatcccagctcctcaggaggctgaggcatgagaatcacttgaacctgggaggcagagattgtagtgagctgcgactgcaccactgcactccaacctgggccaaaaagcgagactatctcaaaaaaaatttttactgtaaatacatatatacaaaattttcagtaggaaaataatgataatttgtcctgtagccaaatactgttaattcaggttacctaagtttctgtgaagaagaacatgttatggatgtttttgctgtcatgaaagtattacaaactgaattcagaatataacaaacttacttttgtatataggtcagaaaaggataacttggaaaatcccttatatgaacctttatatgaatagaaagaagatctgagctagtgactatccaattagtctagatgcacatgtgtacctacttaatgaaaccatctcatcaaagagtaaaaaaaaaagtagatttgtcttagaacaattctagttttatcgttatccagccatgagactttgacttctgtaacaaacaagttagaaataacagctaacataaaatatgtgacttgtgactaagtgagaaagattatactatatgatgctatccttaaaattcaattatttctttttttctatttgcttgactgtatgctataaatacaattaaaagtttgtcttaaaattcaattttttaaaaataaccaagagaacaagaatatggtagctttaatagaaatttcatttaaagcattccttttgctttttgaaattttgacctaaaacaaccagtgttcctattgtggcaggtacacaatttttaaatttttcttcacttgtgtctatgagatattaacagtatttataatatagaaataatcatcataaatataatatgaccaatatccagataattaataataattcctacacacattacatgtttatccagtacatataaggtacactatctttgtacttttatttcttcttatccacgtttcttagaatgtaatacatacaacacttggataaacatagcagtaatcctaataagcctaaacacaatatttttctgatgttgagataagttgatctatcaaggtaaaaatgatgaccacattcttactgttcattcattctttttttttttttttttttttttttcaagacagagtcttgctgtgtcgcccaggctggagtgcagtggcgcgatctcagcttactgcaagctccgcctcccgggttcatgccattctcctgcctcagcctcccgattagctgggactacaggaacccaccaccacgcccggctaattttttttgtatttttagtagagacggggtttcaccgtgttagccaggatggtctctatctcctgaccgcgtgatccgcccgctttggcctcccaaagtgctgggattacaggggtgagccaccgcgcccggccctcagtcattttttcttgtgttcattcagctaattcaaaatgagtgctccaccttcatgattttggacaaagcagaatattagttctgtgagaagttactgagcatagagattaccagttggtaggagagataagtagtatatttacacggctctaatcaaagatagaatgcattaaaagatgtaagtacaaagtgttgtaggaatttgaacatgaaggagacttagggggcttaagtgattagtaaagatatctcaattattgaatgactgacaagggagtttttaagtgacattctagaataatcctaactgttcctggacaagtgttttatcaattttttttttaagtttttaacgttttataacattaatacttgatcaacaaataaatatattgtcaatctctccaaatttaatggccaataaggaaagaaaatgcttaacagttagttatcattttgttcatataattatatatattcttctgcaagagatgctaattacttaaaagttatcttagcttgggcttctaaaacaaaatactacagactgggtgacttaaacaacattcatttctcacagttctgagggctaagaagtccaagatcaagatgtcagcagatttagttcttggtactggcctgcagacggttgacttctccctgtgccctccagatggcgaagaagaagagctcttgttcctttttttttttacaagggcattaattccaacatgaatgtgccaccctcattatttaatctaaccctaattacctcccgaaggccccacctccagtactctcccactggggattagggcttcaagatatgaattttggggtgacacaaacatttagtccatagcaaaggttaaggatcatttattcctcttcaacgtgctattctcttagtatggatatgaaataattttatgttaggggcctacggaagtgaaagctttattagcaacagccaccgacctgatttttcacttagaaaaactatacagttggtcttagaatttaattaaattacatttataacttaatgtaatttaattcaatcttagagtctacacaaagaagaaactgctcatcttccatagtcgtttctttattatttacttgctgactcattcattccactgtacatgcattgatgacttgatcttatgaatcagaaccttcaactgaagaaactgcttactcagaatggtagataatttgggagattttttaatttttattttcttggccatctaggagaatcaattatattaaataatactctggcagccataaaattatctgtagctcccaaagtagtcagcttaaggattgtttaaaagaaatgcaatctaaatattttcttattgtgtatatatttatgtgttaatatatacacaataatttcttaatttattaatttataagaaattaataaattttattaatttctttcctgctctcaagacttggaagattttaggtcaagttatagttatccaaagactatataaatcatatatatgctttggtatatatctatcatctctttctctatatatgcacatgtaaaacttacatcccttgtcactaattaaaagagaatttaatttttttaactttctattttgaaataactataaattcacaggaagttgcaaaaatatgagaggttctatgtattcttcagccggtttccttgactgattcattttgcgtaactaggtttctttaccaaaactaggaaattgacattggtaaaatgtgtttacatagttccgtgtcctttgatcacatgggtagattcctgtaaccactactaaacagacacagaaccattacattaccaccagtacctacctcatgctacccattcatagtcaaactcactcccacccacaccatctctaacacctgacaatcacaaatctatctaccctctctataatttggccatttttagaatgttatatataaatggaatcataaagcatgtgattttttattttggcttttctccactcggtataatgacagagagatccatccaagatgttccacatatcagtagtttgtttcttttattgcagagtggtagtcaatagtatgggcatatcatagtatccttaaccagtcacctattgaaggacagttttgttgtttccactttttgactattacaaataaaagttactgtgaacatttatgtgcaggtttttgtgaagatgtaaattttcatttatctggcataaatgctttatgaaccagcaatcatgtgattgctgtaacatatgcaatgtatggcttttgtaacaagttagaaataagagctaacataaaataagtcactaaatgagaaagaatactatattatactatacttaaaatgtcaattatgtctattttttctatttgcttgactatatgttataaatacaattaaaagtttatcttaacttttaattgtcttaacttttggttgctgcttcatatgataagttcatggtgcattttctaagaaactgccacacagttttccagcatgcatgtacaattttacactcccttcagcaatgcataaaaggtctagtttctctacatccttgccagcgttcttccccctacctgttctaataggtatgtagtactctctcctcaatagtcttaatttgtgtttccctaataactagtgatgttgcacagtttttttttcgtgtgtttaatttaccatccaaatatactcttcagtgagatatctctttatgtcctttgcccattttctagttggaccatttgtatttttactgttgagtttcaagagttctttttggatactagatatcggacctttgtcatatatatggtttgcaaatattttctctcagtctgtgtgttttctcctcatcttttaatagggtctttcacagagcaaaaattttacattttgataaagtttaatttatagatttttttcttttacagatcatgcttttgctgtcatgtctaagaacttttcacaagctctataccttgatacttttcttctacattttctactaaaaatttcatagttttatattttatacttaaatctacaatctatttgagttcacttttgtataggatgtgaagttgaggttgagatgatttatttatttactttatctatggatagccaactgctatagcaacatttgttgaaaaggttatccttactctattgaattgcttttgtacttctgtcaagaaatcggttggccatacatgtatggatctacttttgggttcactattacgatgtattgatcttgtgtcagcccctctgtcaataccacagagttttgattgatgttgctatataataagatttaaaatcaagtagagtgattcttcccactttattcttctctttcatcattgtctattctagttcctttgtcatagaaattttggaataacgttttctgtagctacaaataatcttgccagaatttttattggaattgtgttaaacttctatgtcatttagaaggaaattgatatccttattatgtcgattcttttaatctatgagcacagtatgcttcttctgtttttagatattctttgattttttttcattggtgttttatagttttcagcacagaagtcctgtatatattttattaggcttatacttaatgatgtcatttttgaggtgatcataaatgagattatatttcaacttttggggtccacatgttcatttatagcatgcagaataaaattgatttttttgttactcttgtatcttgtgactgctgaactcactcatcctaggaaaattttggagattccttggaattttctatacaccatcatctcctctcaaataaggacagtcttatttcttccttttttttttttttcttttttgagacggagtctcgctctgttgcccaggctggagtgcagtggtgtgatctcagctcactgcaacctccgcctcccgggttcaagcgattcttatgcctcagccttccgagtagctgggattacaggcgcacaccaccacacccagtgagtttttatatttttagtagagacggggtttcacctagaactcctgacctcaggtgatccacccaccccggcctcccaaagtactggaattacaggcatgaaccaccgtgcccagcctatttcttccttattgatctgtatgctttttattgcacatgccatgagtggtgagagcggacatccttaccttatttcagtcttaggaaaaactgttcagtctttcaccattaagcatgatgttagctgtaggttttttttataggtatactgtattaagttgaagttctcctctatattcagttttttgagtttttaaaaaatattatgaatagatgtcgaattttgtcaaattcttttcctgcatcgatacaatttttttttctttagcctattaacatggtgattacactgattggtaaatcagttctattaaaaagaacattttaaatagttattcaattcattattagaaattagtcattcttacataataaccatttaatgtagtgatcaaataaattgttgaatgtataggaaaaaatttaaaaagatatttaaagctatggaatctgatatagtgttgatatgattattcattattaaaaattagtcattcttgcataataaacaaccatttaatctggtgatcaaataaattgttgaatatataggaaaaaaatttaaaaatatatttaaagctaaggaatctgatatagtgttgatatgagagaagaaaggaaaggaaatgagagaagagaagaggggaaaggggaggggaggggaggagcaggaaaggaaggaaggaaagaaagaaggaagaaaggaaagaaggaagggagaaagggaggaagggaggaagccccttaggaattcatggtagtacacagttaagttgatttagtttctattcagctacctgtctccctgttattccttcgtttgtttgttttctgctaccacctcccacttcctttttctttgtaaagctgggtgttccctcccttgagaattcccacaggattcagatgcaggagacaagtgaccatctgcttacttagtggtgacacatgaaatcgtgtggtgtgcaggtagaaccatcctgttaaaaaatctaggagtctccaattcagcagtctgttaaatagacaagagtagagtaaaagcaagatgaacaatgagggtgaaatagtataatcacgtaaacctatgcatggtggaaaacagacatttaaaacccataagagaaagtttcgaaaggcaccatggcaatatattgcttttatagaaagatgctatgagttggtggcagaagtgaccaactgggagggctttctcactccatcagtttttaccaaatggaagaaataagacagtgcccactgagattgatcaggaaagccagctgcactgtgcatcatttgacctgcactatataaactcttctgcaggcaaacgttgcctccctccagcactgacctgcctgacatgctcagattgtattgctgcaagaggtagggaaagaaatttggacccacagactcatttgggagcaactaaagctcaaatttagtgtaatataaataaatactatagaaatggaaggcaagatgaattatcattattatccagtatttttatagcactttatattttgcaaacggcttcacgatcccatataatgaatctgtggggggctagcggatgcatatgttacaagctacaaggaatagcagttagcacatccattcattatgttttgcttacgtttttattgtctgatttgtttacatgagctatccactcttcctttctttatactgatttttggaaactttgggtaattaataaataattataatagatacatttagatgtatttggatttaaatttccagatgtgagcctgactttatgtgaatatacggctgcatagaatgcaagcatgagaactgagttaaactaagaatatttgtattcttcataaaacaaccaacatggacttcatgattgtgcttcttattctttaaagattttccgcctttcttactcttgctgcattcctccatcccccttcctacttagttaagcactggatgccctgcagcagtgtattttaaaggccttgtgtgtattggccatctgtccagtttactacaaagtagctcctcttcgaagattcctgccctattgttcctgtgaactcacctgtgtttgtcagtacctgtgctttggctttttgtatagacccaggtatgcccctctgtccttccctctgtaaatattgtctagtttattaagcacctagtgttggagaaatggtttcccatggttctgttactctggttcttattgactatctttccataaaccagatcaaagtcttaatcctcacaggagtggaattcaaaactttctagggatttatttaataccaaattgatggctgatttgtgagtaatgtgaatggtctctcaaatctaccttttgatcagagctttacaagcctgtatataggcacgttatctcctccttttccaatgagataatagatagcttagagccagcacatagtaggcccttaatcactctgtgctcaccaatgaagggagcccctactgggatccttctatgaagtggaggttgtgaaagcattaccctcaaggttaaaacctagtgtagacaatgtgacatataattgtgtgacctcaaaaatacatttgatccaattctagtagctgcagaacaggaaaaaagagaagtctaaagtgagtcatgagagaaaagttcaaaatcccaaagtttaatttgttcacagctgttttactgtcaaaggcagaaagaacttcaacagtgcatttgttggaaagaatcacattttactctgattaagaatatgctgagacttgctttttaggtcaactttataattgtaccacacattagtttttaaataactggaaaaatgttctgtacttttaaattattctttggggcggggcgggggtcagaaatttaaggcagatgttttaaattaaagttagtgttttatagtgaatatagttatatttctgaatattgaaagatctatgtaaagatggtgtaataaggaaagaaaaaatcttgttcttcgttcagtaagccacaaacttggagcctctctatccaaacttcaaaatcctaagcctttttaataaaaatattggaagaggccaggcatggtggctcacacctgtaatcccagccctttgggaggccaaggcgggtggatcacgaggtctggagattgagatcatcctggctaacaggatgaaaccctgtactaaaaatacagaaaattagccgggcatggtggcatgtgcctgtaatcccaggtacttaggaggctgaggcaggagaatcgcttgaacccaagaggcagaggttgcagtgagccgagatcgcaccactgcactccagcctgggcgacagagcgaggctctgtctcaaaaaaaaaaaaaattggaagaaaaatattgtttgtaatcagaaagatcactaatcttatgctaatttttaattatatcaaaagagtttttaaatttgatttgataaattacatttctttaaaaaagagaaaattgattacataattaaaaatttaacctgattgcagttaaaggaagacaaaatggtctaaaattatatctactaggaaaagcagttgaatatatttctcttacctttagcttattctaagatgaaggaaaataaggagaagtaattgaaatgtcagattccagagtgattgttcatttcaagtggacaaaaacctttacttgctttaaacttaagagggaactactcaagtaatagagatataggaatgtaagatgatgactgacatgtagccaaaggtggaggcagaagagaacagagagggattattattattttttaaatttcagccatctctggaacagagtattcatcttcccactcttgaacattttccagcttgggccaactgtgtgtatccagtgaggtcttgtttaagacattcagaagaaaattaagttatggaagtttccaatctcctttttttcagtaatttttccccccactagtatccttccaaaagcctctaccatgctctgggctttctgctattaatatcatctaccagaaaaataaggtgacactttttgtggagaattaacattttgatagagacatttaaaaaatgttcacatattgttaaaataacattgacacatctttttaaagaaaagaaatcaaaatcatccatattctcagtatcaaaattcaactgttgtcctttctttctggcccttattgttatagtgttatctgagcaaagaagtaattgtgagatctaattttttgtttttaatagatagggtcttactctgttgcccaggctggggagtatggtggtgcaatcatagctcactgcagtctataactcttagtctcaatcaatcctcctgcctcagcctcccaagtagctgggactcaggcacctgccaccatgcctggctattttttttttttatttcttagtttctgtagagaaggtgtcttgctatgttgcccaggctggcatcaaactcctgggttcaaacaatcctccagcctccacctcccagtgtgctgacatgagccaccatgcccagcctgaggtttatttttgaatatagcattattatgtaaatgcctcccatgttgtcccatccttcataactttcctgttttgtcttgacacactaatccatccatttaatgtctataatctattaacagtttccttgtttggagacatttaacaacttgtttaaatttttttaaaattactgatttttttttttttttgagagggagtctcactctgttgcccaggctggagtgcagtggcatgatctcggctcactgtaacctccgcctctttggttcaagtgattctcctgccacagcctcctgggtagctgggactacaagcacgtgccaccatgcccggctaatttttgtatttttagtagagacagggtttcaccatcttggccaggctggtctcaaactcctgaccttgtgatccgcctgccttagcctcccaaagtgctgggattacaggcgtgagccaccgtgcccggccccaaaaattactgattttatcagaaatagtttctactcattttttttcttctgaattatttaattgtaataaattctcttgggagaatcaaagcatgatgaatattattcatttttaccattttattttcttcagtggtatcaatttgcagaactactaggtgttcactgacataagtatctttaaatgaacaaattttcaaacaccttcacagcaagcccaaagagctgatgtactcttcaaagatttctaccaagaaaaaacaaattcaggatcttctaagtatagaagggttttacatttttttttctaattctatcttctcctatgaaagccctgattataaaattataaaagcaaagatttttttgtttgctttgttttttttaaacaatatatattgtggacctgaggaatctgacattcccttatgtccacgaagaaattatgtcatttatttgttactctgattcttctgcattaaaaataccacatgtatacgttagaagcaatttcagtattttttgtcataattgcaatgagaagataaatacctttttaaactatattttatatatttttttcaattttagaggtctcacagtttttctaaaatgtcctattagaagtgaagggatcactttggtcctcatttgtttccacagcattttttcaacctaaggttttctttcagccagaggaccataaaacacatttctcaaaatatattgtagggaacactactagtatcttgagatgaaattgtcatatggaaaagaaaaagatccaatggaactataaaatgcattcataaactcattggttctgaaaatgtggttgctggaccatcagaatccatatcccttgggaacttcttaggaatgcagactctcaggcccacccccgcctactgagtaagaacactaaggaggcagagccatcaattggtgttctttaacaaccctccaggtagttatgcttttctaagtaatttgtaatgccattatcttaaaaaagtttctgagaagttccttaggggagagaaaaaacactacaacacgacaaaaacctctaaaccttgtttgcccaaaaagttgaccaaagaatatctattttctcttctaccaatcacaaacttttttttttttttttttgagacagggtctcgctctgttacccaggctggagtgcagtggcatgatcttggctcagtgcaacctctgcctcccaggttcacaagattatcctgccttagcctccggagtagctgggattacaggagcgcaccaccatgccctgactagtttttgtatttttagtagagacagggtttccccatgttggccaggctggtccctaactcctgacctcaagtgatccaccctccttgtcctcccaaaatgctgggattacaggcgtgagccaccacgcccggcccaatcacaaactttttttttaatagagatacagtctttgtgtctaggctcaagcggcagttgctagtttcaacctgagttgttaatacatttaacgtgggttcattagtgtttgatatatttcttgtggctagaccatgggaagaactgctgtccttttggtagcgggatacgtcattgcctgatgagttgattaatctttgttattctgcaatacctgtttgtcatgcatatcttagtatatgtgaatagagtatatgtctggtatgaattgtgccattataatggttcctgataggagagattctattttcatttgctaggtatttgagataacatatttactcactagagaggagtaaaaattaagtattaatatttaatgaacggatactaagtgagaaaaaaattagagcctttggactaaatatttattatcttacaagagcaaatagctatgttataaaatgagaatatgcaaataataaaatggaaaattgaaagtaattatctttacatgtgctgtaaagttgctagttgaatttattgcctattctttttaccagttcaaaggttagtgggaaaataccgttttgacagcagacttctgacagcttaataataatgatcaagctttgtgcattttatttaaacatctatagtcaacatgctctattagtagctctccttgtatcttttgcaaaaataagattttagggaaaaatgttatgttttatctcaacaaaaaagtctagtgtatgttttatatttgcatctcttaccctgtatgtttaaattacaaagaaattccttagttcaaatgagcatgaagttgtttggcaaactgagattacatagctacaaaacccttggtagatggtatctataaatagaagtgtctaacgtggaaagtgctctgaacaatataaacgggacttttgcaaaaagaagtggagaggaggaaagcctacagcgttgatttaaaagactgtaattagaattaggttccgataattagatcccagtagactgagttctttttcctcaaacaaacaaatcataaatgagtataggatgtcatttctacaggaatgaaaatagaaatggaattttaaataaagattgtgaagcaaaatgtggcattttaattcttgcacctggaatcatttcataatgaaatgcaaattaattctaaaaatctctgacctctgttttgctgattgcagcctaaaatcactcatctggttttgagaaaaagagaaaatgcatgccaagatgaaactatttagtatataccttggaattttataatgaacttagatgactgactgtggctaaataagtttacatttccatttttaagaaagatcggaaaccaagaatggaatacttggtataaattggggatgaagccactgtgattatctgaagtcattcattggcttaaaattttgttcatccttcactagtgagttcttatgggatgtgtgcttattgtatactctttagttctaaatttgcaagagaagtaaaactggaatctactttttagttttgaaaaatgtaagtctgagcttcattaactagcacttataaaaaagaagacacactccaattgacattttcacattgatgtttaatttaaataagaaccaatatttctatggtggtgagctgattgagaggtaaaagacctttaaatctccttctgaagcttactgcccaataatattttattttctatatcattttattgaccaatgttgtcatcagtttatctaacagaaaaataaaaattgcaatgtcattaaaaatatataccaccaaaaaaatacggttgatgcagttgaagaagtaaatggcaaattcacagatattcataaaacagctattgtataagactgagactagaatgaaaattttgtatctaatgaaaataagatgtcttcttctttatttatactcacatcccctttctaaaaggaatctgaagctctttacaataagaccacctagatttttttaactatgaatagagatgaaaaatcagaacacaggcaaaaagaaggaaaaaagcataaggtagggtggtaaccaagagactcaatgtaatttattataatttttatagttagtctctgagcttcctgggggcaaaagaaaatgaaacctgtatgtccatattgtcttaagttttaactgtaaatacagtgaggtttttgttagacttaatagtgtgcatatagacacacattcagtacatgttttctgatgccttccatccacaggttacctggttcaattgtcaatgcctaagtcatctttaaaattgctcagtgcttttataatattcataagtcactgaaaatagaacaaaacaaacaaaacactggcactttttcttcattttatttcactgttgaacttgataatgttggaaacctgagcagaataagatagtttgatgattggctgggctcttcatcacggcttgcctttcagtataagatattaaaatagtggttttcaaatcttatagccctagtatcatcttagaggtttcagagacaatttccaaagtaagtgggaagccagtttacccagaacaatttactcataactgctttatccagaataagttaacttttctctactttacaatgttagattgtattttgatttgctttgaaacaaagttctgctgaaagcagtttaataatcacttaaactggtggtgagtaaagaccaccaacagtgctatagtaaaaggaactgatagatgaccctcgggggtgaggtttgtgaaacctctaacaagggaatcctaactatggatggatagtttttataatgttagcaaccctctaaaattgtaagaaaatgctacatattttacaggcaattaatctagggggatagccaagagttttcttcggttcttgtattatcattaaattttagaaatggataaatattttttaaaaagcacctagaatggatttattgaatagttaataaaagaaataaaacattataggaaacattgaaatcccttttttaaaaccctccagacatatttctgttgttctcttctcaaacacaactactctttttaatttggtatgtataattcctgttttttacgctttcactacatatgtagatcctgccattaaaatacatgttgtgttaattgagtgtttatgaaaattttcataaatattttaccacaaatgtcattaaccatcttgtttcatcacattttattttattttttgtgtgaacacgtatagtttctagttcatttaattgcctgatgcagttctatattatgaatatgtcacatttaatcaattcatttcatctctatggaaaaatactaaagtactttccactcactcactaggtcaagtagcataacagggaacatctttgcacacatttttaagagttggactagactggaatgtaactaaaagtgtacttgaggctcacagagtatgcacatctccaaattgtgtttgtaaaatccaagttatcatccagaatagctgtacctgtttacattctcctcagcattgtatgaaggttcagggtttttggcatccaacagtggtactgtatattcagactttaatttttacagttgaatgggtataaaagagcatctcactgctgctttcaagtgcatttcccttatttctagtaagatatcttctcacttaatgtccattgggtttctttctgtgaattgcctttgtgttcattgctcatttttttccctagtaggttaacatctttttctagatgccatgtaggagttccttacatatttggtataataattatgtgttgccaaaatacatttattcccagtctggagctgctcttttaactttgtccatggagacagattttaaaattatgttttaaattttattgtggaaaaaatgtgcagatcttcttctttatggtttctgccattcatgtcttcacaaatccctcccaggctggatgcgataatgcatgtctgtaatcccagtcctttgggaggtgaaggtgggagaattacttgaggccaggagtcagagaacagcctgggcaacaaagcatgaccccatctctacaaaaaattaaaaaattagccatatgtggtgatgcatgcctatagtcccaattgcttgggaggttggggcagaaggattgcttgagacccagagattgaggctgcagtgagctgtgatcatgtgatcacaccactgcactccagcctgggccacaggagaaaaccctaaaaaaaaatccttttctataacaattttataaaattatcctgtcaatcctataccttcttttaaaaaggttaaaatgtttctatacctacttaggctatcaacctcacctggccagaattctgtgataggccatgtttctataaatgtacaacgctatttctgtgacctctttttgttgcattgatttaactctactccagatttaaattttcagtgactgtagttttataaccttgatgtctggaagggcaaaaccccatatatcttatttattatcttcaaaactgatttaaatattcttgagattttctcttctaggtgaattatagaattattttccttttttgttttttcttttcctttttagagacagggtgctgttctctcacccaggctgaaaggcagtggcaccatcatagctcactgcatcctggaactcctgggctccagcaatctgccagcctcagcttcccaagtagcttggactacaggcatgtcactgcacttagttagtatttttatttttagtagcaatggggtctcactttgttgcccaggatggtctcagactcctggcttcaagtgatcctcctaccttggcctctcaaagtgctgagattacagacatgagccactgcacccagctttttttgggcacttttcaagaagaaactttctggatttttattgaaatgtcattgaatttatagattaattttatgataattgttactttttgaacttgagtcctccaatccacaaacattgtatatttatgtgtattttgacattttttgtaaatatttgcagtacttttccttgtaccttttgacattttcatcttttacatgcatgtgttgtaacttcattttgccacgtctgaattttttcatttgtcttattttgatgttcattcttttgttgatttgtttattgtttgtttgttttccctctaatatgagaattcatgtcttttgtcaactctggaaaatgctcagtcattgttgcctttatctcattctctattctcattatttttgaaactcatggaagactcttgatatgcataaaatcttgcaaaagcttcagagggaaatatatgtataatttctatatatatatgcacacattatatatagatatacgcacatacacacatataagtgattttatcatatatataatcacatatgattataatacaatcccttatatataatcacatatatacacatatatgtatatatacatatgtaattacacttacatacatatataatcacttatatgattacgtatatcactgatatgtatatataatcacttatatgtgtgtatgtgtatatatagtcttatggtcgccaaattctcttttctatttttcaactacaccaagcccactttcgaccacaataatgctatttatatctttacatgtttaccttccacataagattcatttgaagaagagaacacagctttccttggtgccagctttccctgagtctatgtatttttttgttatacagttgtgttttaagattgtacagacagttgatataactgatctttggaaactctattctgaaagaatagagtgccactattcctgagcaagaaagagatgttttcaatttcatttcctgaaccttcccactctcccgttacacttaacttaaacaaatgtacgtacatcattgcatttataactatcagagatacaagtcagagaactggccaggatgttcattaatcatgtttgctggtagtaataaagggaaaatccttaaaagctatgttgtttgccttgtgggtgttagtcacataaaattcatggctttgccctaaactagtgcgcagtaaagaccagacaattgcttatcatgaggatggattgctttggcattagtgcttcctgacttaaaagaggggcttatttgttcagaaaatgggccggcattggatgagctttcattatttcctgcctctacttgtgtactcttgcattttgcaaaatattgccagtcttctgttattcaagtaaatgtttcaactgtctatataaatcatttctcttgatgcaaccaaattatttaactcagaaagtccatccatcaggtgcttcacaatttatcattattttaaagtaattggtctactcagtagcataacacttactgacataataaagtcatgtggattatagataaactcgtgagatacctggaacttggaactatcattcctatatagggccaaataatccactattgatttggaacaacaaggtgaagaaaattaagcctccccaattccagctagtattttaattgaaagagctccaagaaagactcaggtgctgtaattgtgcggtaatttggtatggcagcttctaattatgaagcacgaataagaacaaccttgggaaaaatctcggtatgccaagattcacccattgcagaagcagaatctgagccaaatggtaatttgtgaggttattaaaatgactattaaaggcttggatcagataccgctcaacttctgaactttgagttaactagaagttgatcagagttagctttctggagcttttcatttgtttctgtattttgttaaaagaaaaaaaatctgacttgcatgcttattgcatgttaagtactgtgctgggcattttatacattttagctcatttaattaaattatcataatgctatgatagttttagcatctaaactagcctaaaaagggctagttttaggccctttttacaaataataaaattgtgtttcagggaggtgagcaaatttctcaaggttatccagctaatcactattcaaaaccaggtctgtcttttcccaacgcctgtttacttccctctacaacaacagtaatgatgaatgaatgcatcgacatatgttcatctcaaggctatctcagtgctccttaagcattatctagtttgactgggaacttttttgaggccatgtggtccatgtttaccaaatgattcaggcatatctagccatccttgagaacttgtcagagcaggttaagaggttaagagacaggcaatattgttaatacttgttattaatacttgcttcagtattctccactttgtatttgtggcaattttggattggtaggtaatgaatagaagatagagttacggaatattagataattttataactctttggatgcttaagagcctagaaaagtatataaatatcagcagtgcaaggagaaggaagcaggttggatacagagagaacttggaccctttgattgctcagcaggtggttggatatcctgagatggggaagaaggacagacctcaatatctctgcattgactaactgggtcaatacagagctgcctaaagttgtatttaccgctggaaaataaaagtgaagaaatagtaatcaaaacagatttttatatgccttattgctaaaagtgagtattatagataatgccactaatttcagtaaaggcagtcttattccatattattaccttactcctaccactgggactgtgagaaaacactaaaccactagcattgtctaatttgctactacaaaaattacttctaacagaaagtgagagattaggggattataaaatgttaatgctggataagacttttgaaaccactcctgttttacggatgaagaaactaaactagagaaatgaattagctagttcaaagtcagacaactagttacccataagactaagacaaaaattcaaatgatctgacttccaactcagtgatatacccacaatatcatgccaacttctagttttattttaatgttctattcttattttttatttatttattttaagacagagtctcactctgtcgcccaggctggagtgcagtggcgcaatcttggctcactgcaagctccgcctcctgggttcacatcattctcctgcctcagcctcctgagtagctgggactacaggcacctgccaccatgcctggctaattttttgtatttttagtagagatggggtttcaccgtgttagccaggatggtctcgatctcctgacctcgtgatccgcccgcttcggcctcccaaagtgcagggattacaggcataagccaccacgtcaggcctctattcttatttttaatgttaatttctttaagtgtattacatttgaacaatgtaaaactcatttctattagaaaacagttagatttctagagtctcttcctactcactggtctccacaggggaaaaaaaggaagactgtgataaaaagaaaaagagaaaagagaaggaataaaaaggacaagaaaaaagattattttgcttcatttttagctatttatcctcagataaaattgagaactgaaatctgaaaaccgttaaactcatgacttacttttattatggaggaattagtttttccttttattatggaggaattagtatttctcatttatctttcagctctcaagtactccctgtgtgaattcgaacatttattccacttaaaaaattcacaagaaatgcccaaagtctaacatgtttccagattgggaatattttcactaatacagtactttgtcctcctgggtaagaaagaagctctctgattactggtctgaaacttagagaataagacaatgcttttcatgtaattgattcatatacatgggaacgaatgcctttgcaaagcagttatttctatgcctgacctacagagagtctgtagtgagccacgcatgtggtatcattagtcactgatgatgacaacgagaacaggaagattggagtggcaggataatcattctcagcaaactaacacaggaacagaaaaccaaacactgcacgttctcacttataagtgggagttgaacaatgagaacacatggacacagggagggaaacatcacacactggggcctgtcggtgggtgggggcctgagggaggtatagcattaggagaaacatctaattagatgatgggttaatgggtgcagcaaaccaccatggcacgtgtatacctatgtaacaaacctgcacgttctgcatatgtatcccagaacttaagctataagaaaaaaataaaagaagagagagagagagagagaaaggaacccaaagtcctagaaaaaagcatggggccagggggattcgttttcaaccttggtatgagaaaggctttctaactataactcaaaatccagaagcaataaaattgaaaaaaaaaaaaaaaaaggaaagaaagaaggaaagatgggtggtagagagacccagtagagggcagcatcagtaatccaggcatgaggagatgatactgtgctggaatggtgggggaagagaaaggtaggggcacatgctggagaaactttaaaggaaaaattgagatgtatgagtgattgaatgtattggagttaagatactgacgattataataatgtatcttgcatttatatgttatgttatgcatttatttgtgctccaataaagtctatcatatcattgatcaaaattactatatagtcttcctttgttttgagaggataatttatttcaggaagaagaaataaactgcacaaggaaagttcttctaagtcaatagcttatttaccaccaagattaatgacacacaatcactttaacagttaaaaagtatatgtgatttttatatatgtgaaactttagtgcaaatcaaactcaaacagaatagtaaaaacataagaattttttttcaaccttaactgatgcataagattatctggactataaactggaagactaccagtactcagaggagagaattcagtgcaacgcatgccagatttcataaaactgcaaagatgactgcatggtgactctcgtttcatggtgcttagctgccactgaggcatgtgaattctaaattggtcttcataaatgtgaaggaatgcctggaagtcaaaggaaagcattaaaggaaaccccttatacatgtttaattctcataatctgattggttatatcaagaggtatgactatatataaatgtattacaaatagttattgaaacacattgttacaatagttattattggttatatcaagaggtatgactatatatgaatgtgttacaaataagctatagttgctataatgtttataaattacacaacacctaaagtttaggaagtggatagcatcttctcatgagatggatagcatctttatatatctctgacttttccactgggcttcaaatgcatattaaaggacattctataaaattaccagtattccatcatttttggtctacaaaaatgtcagtttcacatagtttgacctaatatttgccactctcaacttgtcatttccacttggcatagtcttggcattacgtaggcatatgaaaatccagggtttgttttttttttccaccgaaacctgttccaaccacaggtggtccacagctgtccacatttcagcaaatgatgtgatacgatcattcactggatggctcacgtttcaaacctgggcataactctcacttcttttctccccaaactcacattcaattcatttgcaattgcttttctcttcacctggaaaatgtatgtctaatttgtctactcctctctgtctccaccattagcatcctagtttgtcattattttttattgaatttatgtaagagagtcctagctagtcacttagctttccactcttgccttcctctaactcaatctctaaacaagcacatgaagaatatttaagaatgtacattagattatgtcactcccatgctttaaacactccaagggcatcccatgacacatagaataaagtccaaactacatataatagttacaaggctctgcgtattgtgaacctaactttctgatttcttctcctactccaggattcaccatactcaaagtaaattggaaaacagatcttgggtctcttgggtcctcttgggtcctgttgttcccttttcctgaaagctcctctttatctttacataattggctccttcctgtaaatcaggtctcagcttgaatgacatatctttagagagatcttctctgacaacatattctaaatagccacccccatctgtcattctttatcataccatcatttaaaaaaaccctcagcacagcacttatcacaatctgagtgatagatgtcttattcatctatttttgtagcaggatgttagaatgaaagttttagttgggaaatattattttacaaagtgaacaagaggaaagaagctttcaaagtaggactagggagtcatgtggttgactgtaaaaattcctcatccacaaagaggaaataaaagaatcagaaaaatgaagattaggaaataacttagggaaagttttttttttttcaggtaaccattggagttccattatttaacaaattgaatgatataaacttataattaatgttatattaaaacaaagataataaatatgcaaaacgaatcacttcttaattatgttgttatgttttgttattatctatgctcttcaggtaacctaagtcaactggtaggaatactacatacacagtgatgtattacttgctgcatatcttcccaactctgtttttgataacattatattgtgcacgaaattagccatgatggaactgtttacaccaagaaattagcaaacaatatagattaaggttttattgtttgttaataatttcaacttcaaaaattgagaaaatattaataatgcagactaaacttagtgttgtgtcagtagctataacattgtgaatagcacaaaaatcaaagaaatattctagtattctaaagctagctaatataataaaaactcagtcacatcactgagaacaagtaaattcttgatacactttttcactctttcactttcatattactcattactgtaaatgaaaatacagaccaatacccacgttggaattatacatgtttatcagttccaactatagattgactacaggtacaaaaggttgacaagcataaatgtacttctataagaattaattaactatgtggaatttgcagtaaagagtattatatattttattattgactatgagttgtatgctatacctctttttattagcaaaatttataataaacttcatacatgtgtgtatccattatttttagagagctctttgttaaacatttaccagcacagcgctgtgatagacccactatctagccaagaggaggcaggttacttcttttttcaccttaaatcaagaaagggacactttactaaggccaccgagagagcacagactatatcccccacaactgggggaggggatactgtgaattggtgtcttacttcactttaaaaatctaggccaggcacagtggctcatgcttgtaatcccagcactttgggaggccgaggtgggtggatcacttgagtcccatctctacaaaaaaaaatacaaaaattagctgagtgtgatggcaagcgtctgtaataccatctacttgggaggctgaggtgggaggattgactgagccagggatgttgaggctgcagtgagccatgattgcgccactgaactccagcctgggtgacagaaggagaccctgtctcaaaaagactaaaaacaaaaaatctaaaaggtgacagatagccttgtctggctgttctaagaagaaaggctttagtgacttaccagcgtgggaagtggtgttggggcaaagtttgtgttagtgtttcctgtggaccagagatgagcctcacatgagacagattaggcacagggtgaatttagatcctctaaaaggaggctgcccagatgagtaaaatggatgtgtataaaggagctacaaatgactcctggatttctagagaagaaaagaaggtggcatcagtattactaaagggaattccaggtgacaaatccctagctgggaagggggaatctctgaagaagctttaatatgctaaaaagagaagggggcagctttgaaccgctgaaagaggagagtgtactgccagcttgtgacagtactactagtcacaataggactttgctgctccatttcctcgtgtctgttagcggattcacaagttgacgagcaggaggagaagtataaattgagaaaaaaagattaaaaacagcacttctcgccactccctcattccctagcagctgctttccacctacaacaggcctggcaatgaaaggctcctcaacttttcataacgttcactttttgaccattaaataaaactggatatcccaggagcagaggaagacccagctcccatccaataaactgaaggagatactaagagacaaaaatatgattgccttatgattaaactctacaaatcatgcttctttaatgaaagaattatatttattttccccttaaaattgaaaaatttaagaaagcagggcttcagtacataggagacacccagtaaatattaattgtatgaataaacgtagacaggaatgaatgattgctcattggttcttcctttggcacttgatgaagcagactcagagaagctgtatatataaattgcttttaatataaatattcttttggtaggaaaaggagaaagaatgagaaaattcaattctgaatgattaggagaaagacagaaatgggtggatctgaagaaagaaccactttcatgtgggaaaccaattcatatgatttctcatcagtggcatggaggaataattgttagacacttacacatccctgaaatgtgtcgtcagtaattaggacaggccctagattctagaggagggagacagaaatttggccaagaaatgaaggggttgaaaagttttctgagactgagggaaaagaagaaaggagaaacataaattcaggtatatactgcaaatatgtaagagcaaagaagacttcaggtgaactctagatttttattttcatgtgctcctctccttcaaattcagaagaaaaggacaaagctaaaactatatgaaatccttcgtctaaaatgacgaatctgaaaattccagaaggtaggagcttagtttcaatgagatgaagaaaaagcttctcattcatgaaatacattttaataagttgaaatttgaacaccaggtgtatgaaaagaactagaatttaaccatatgtgttcagaaatatttagcccacatattttccagaataatccccaaacatgtttaaggatataattggtaagtaagaaatttgaaatccctatcagagtttgccagagttgtctaagatgcattgagtactttcagtaaaccagatgctgcattttcaatccttacagcactgagaagatactgttctagttgaagttgcatgactcaagtgggtcaaagcttgcccaagttccctgagttaagaagtagaatttcaaacacaggttgaactaaccttagagtagggttttcataacaacattcgcttcccagtaggagttttaattttaacatgatgttccttttggatttaatgttattaagggacatagtggatgaggctgactataatttgctggctttcatataagcatcaaacaattgcatttccttctccctatcatttttagtcctttatgtgcagccttgcagcattgatctccaggaaagcttgtgttttctggtgcacttcccagaaacaaaatatgatatgtgttcccttttgaaaacaattgataagtttcatgttgacagaaacatttcattttccaagtcatttatctatttgtcataagaggaattataatagtatattggcttccataatccaaatccattccctttagtgtatttttttaattaatacttctctacttaaattctgatctaaaaaagtggccattaattaactcagggagcaattcagctatttttttttctaggaaatgggaaatctggtaaatggtttgtacttctactttgtcaaaaacatgtatttttccaaactgtatgagaactttaataacactccataaatttcatgcttttagtcacacttggaatggaggctttgggaactctataaccttcttaatgacatgttggcttggcctcagcactgtagcttcaacttggttcttaatggacattaacccatagtgcatagccttcaggtaacacagttggtgatttgtattttttttctggaaaggtccaagacagatccaatattatttccttttaagaatttatccctttttgagacagagtctcactctgtcacccaagcttgagtgcagtggtgcaatcttggctcactgcaacctcccccactccccaggttcaagggatcctcccacctcagcctcctgagtagttgggaccacaggtatgcaccaccatccctggctaattagttttgtatttttagtagagtcggggtctcaccatgttgcccaggctgaattaaaaatatttctcatgaactacatgaaacctcgtaagtgtgaaggcttcttgaggacaaaggttgtatcgtgcaaacctttacatatcctaaggcactaattctttgcccattcttgtaaccaataaacatttattcagctcctactatatgccgggtgttatattaacggctgggtcagggcacatacttatgaaaatagtgtatttatatatactatctttcaaataataaccagtacatttttacaattaaaatataaaataaaattattttggcttgtatgtgtgtctttcctagaaaagatttgctaacagtaaaataaactttatagaactatcattcactcttagttgcatcttggcaaatagtcaagggcccttccaaaactttgcctgtatacactttggattttaattagacacaataagacccccctccttaatctggctctgcttcttgacaagtcatcatgaaggtgtgataatatcacacaggaaattatcaaactgctaaaccaagtacagaggagacaaataaaatgttgatgcaacagctgcagagactgtcctgaaggttctgtaatcaatggtgtcttgagagtcgtatctgaggtagagtctttccaaatgcacacagtgggtggggcagtggtatctgaagtggagaaggagggcagagaacatggtatctacacatggcagattcaagttcatgcaagcaccctgaagacagagaatttgtcttgaataattttaaatttagcaagatggaactttaacctcataaagaatggaactcggtgagttttggaacaaaatgactgtttttggactcaaatcatagaaagcattctcctgcaaatgtaatatatccatttgtctttagcaggaaataaatgaatttatttcaagatggtgtcccagagaaggcctgaggcacaatcatatttaaactgtatgaatactgagtgacatgattgcatccagtgtggtctggattatttgagcaaaccatggggacatacttacctgtttatttccctacatctgtttatttccctacgtgttcttgacgttagtgtcgaaggattaccctgagacctgtctcagtgtcctcttgagaatggatatacacattgacataaattattaacttctccctagataggtccattaattttctgtgaattgttatggctttattagtttcccatcagttattcttggtctctttccattaaagagaaatccactcttacttaaatttgtgtcttgcactaaagttaaattcagccaacttcgttctgaatctatttaatcctaaaattatttatttaagtaaactttcatgtatcctcaggagcctcttttcctgaaaagaccaaagagaaactttccttaattaggcataaaataacagttctaagacttgttttataaatgacgatctgttctataaggttactgggtcacgagagctaaaatctttggtggtttttgaaaactgatacttgagggtctgaaaagctgctcggtttcagtctcacattgacaacgattaagatgttgagattccagaagtgaagaccttacacaaggagatgacagctgtcagtgtataatcagaaaagcagccatgaagtgataattcctctgtttttcttctgtgatgtcctagtagaggtgattttaagtaaaatagattacatgtcatggctattagcaaaggcaatagacttcaccacctttgccctgagctatgttatatctgcaagatcttcaacaatagttcaacttacaccaggaatatattagctcgttttcgtctatattcatacgttctactccatgtggctttctgacttttaaagttgggagggagtttaaaaataattttatataaccccttcactttaaagataaagaaagtgagacccagagaaagtaagttatcttccaaggtcaaagcacttctagcagtaaaactttaagagaccatttgggaaatttcattatgatttcaatggaagtcactaaaagtactattgagatagtcaggaccctggagtcagtgagcgatgctgaattgctgggtccagggctgatgaaaatgccactgaaactgtaatagcttagccaataattacattataatatcagaccccttgcaatttttgtgtcttgatcattgaaattgtaagaatgttagtaacagaatatgttccttccaggggtgggcctaacaccctattcatttttttccccttgtacaataaaagtggtgccacaggcatattgaccaaatcattagaaaatcaattactattgagttagagctgaacaaaatagtttgaaaagtatttaatttatcccttgtaatatctgttcttttaaagttcctgtaatctgtgatccctggctgactcctctgtgatccctgacagaaaacctcattttcaaatccttttttccccctttccccctgctatccttccaaatgagaaaatcattaaaggaaaagaaaaaagtattcagcacagtgagataagagcaaaccagctcaactattatgagagaaacgcctgtttccctaactaatcaaaattcacagtaagtgtgaggaaaacaaagccaaactggcagaaataatacagttagacttaggaaagacctagaatgcaggcatatctcataaaaaggttatttagaaataaatctgatggctgtgaggtgagaagttaatgttagcatagagcagaacctaaagtcacttgattttctgctatttctgaaaaggtcacctaggtttaatcatatattctactttcttccccttgccttccatttctcccttccttccctctctgcttctattcctctccctttcttccctctcttcctacctctctgcagtctgcacttttcccttccattctccatcctttctccttttattcctctcttctttcttccttctcttcctctttcactgtctctctttctccccttctccattccttttccccccttccccctctttatttctccctctcctttctctctcaattacatctttcttctcttttttctccccacttccttccataaaggaagctcttttgttccaccctctacaccaggtcctggagttacaaaaacacagcagccagacaccccacactcagaccttacaggcaggggcaactgacaagttttcagtactaaaatcatgtgttaagtactaaaactcagggatttttttttttttttttttgagacaggtctcactctgtcatccaagctggagtgagtggggtgatcatagctcaccgcagccttgaactccagcctcaaactcctgagatcctctagcctcagcatcctgagtaactgggactacaggtgcatgccaccatgtccagctaacttgtatttatttattttttttgtagagacagggtctccctatgtttcctaggttggtcttgaactcctgggctcaagccgtcttcctgtcatggcctcccaaagcacagggatgttttaaactgttagtggaggggaggtttcgctaaactcccccaacctagggtgatctgaaaggacttcttggaagaaataagacctcagttgtatcttaaggaagagtaagagtaagccaatgaagatgggagttgggatggaaaaggggaaggggaggctgaaaagggagagtggaggttcctgccatggtaaacagtgtgtgcaaatggggcatggaagaagggagggagggagagagggaaagaaagtaatacagagagaaaaacaccaagattcaaagacaccaagatgttttggtctggaacgtggatttcaggtccttatgctgatctgtctcccttaaatacaatgagtgccttagaaaggaaaccatattatttattactcccttaatagaaagtgcttctttacagtagtggatatgtttgacatattacatacaagatgcccggccaaatttgaatttcagataaacatcacattatttttaagtatgtctcatgtaatatttcatgtatatttgcactgaaaacatgatctattatttatctgaaattccaagataattgggtgtcctgtacagttatttgctagatcagcaaccctaattaccaagcaccagatagttaataaaagtttagtgaatgaatcactaagtcagtctaagatgtatataagaaagtgtcaggagattcaggtagacagctagtcaagttaaagtcaaatgtttaggagtcattgctggttattaaaactataggccagcatcacccaagaatgttgtgtaaagtgagagagaattaaggatgagtccctgaggaacaaaaagattcaaagagaaagcagaggaaaactggtatccaaggaagaaatccattcattaggaatagaccttggagaaagtgaggacatgaagaccaagaggagtgcacttcagaaaggaggaagtggccaacagggtcaaagaatttaggagtcaggagggtgaaaaacgtccattgatcttagccacgaaagtatcactggtggtttcatcaagtaggggaggtgtggatactagccagatttgggtgagttaaaaagttaaggatgggccaagtggagggagtagagacatggtacctgcaacctgttgcctctttcaagaacctagggttgccagatttagcaaataagagggtacccagttaaatttgaatttcagataaacagtgaataaaagtatagctgttactgaagaagagagagaggggcaatgcccatgggggcatcatttaaagatgagaagatccaggatgatcctatgtgtgaagaaggagaaggaagagtgaagaaggaagaaagaggaagaaaggaagcagaagaaagagtgaagttgaaggtctagaagaaattacagaaagaaaaatttaactctagggtcacagtctctcctctgaaaccgttgaagcctgatgccagaattttccctggaaaagtaatatggtttatattttctattagcactcccctgggggttctgtagaaaccccataatcaaatatgttaatatttttaatagaaaagtgtgaatatttttactaattaagataaaggctgtaaaatagcctcgtttcagtttagattttgctttgctgccaatgaattatattaaaagacaaacaattttggttttcagagctttttaaattttgtaattgatgataaggtattaagaatgtgctcagttctcttcttggccccaaggcaagatgaagcaataccgttaattatctcttaaatatatatcagtcaataatataactgttccttcccagtctactgtagggagttcagtgttgccttaaatgttcctggtactaatttgttttgcaaaatcagggtaaataatggaaaaacaatatttaaaacacaaagtaaagagaccagggaaccttgaggttctgtgtgggaaatggaagagagactgatgggaagataaaataatgattctcatggtaaaggggaaaagagagagagacaagcactggttgggttcaagagaagtttctgaggatcaggtcaaaagtgttccagccccagcccacaaactccttcagggtcttaagtcagatatacaagtcgtctctggaagagaatgatgaaggagctcaccgacagtccctgtcactcgtcctaggagggatgactattacggcagagtcccctcctcctgatccttctgccattaaggtcccaggtcaatgtcagcttatcaatgggatgttctccaaaccccctatgaaatacagtgccctctctccacccatccaagttcatcccccattacattcaccagtttcatttttttttcttgggcagttattaccatctaaataatgttgcatatatattgtttccttgattcatttttctctcaccactagaatctaaatctcttgagaactgacactttgtagccttcagaatctagaacagtgcttggcacatagtaggtgctcagtaaccatttaattaaacatagatgcagaatggaagtagaccacaccaacgctccatgaattaaatggatatctattacctgctcttgattcctatccattacagaaagctaaagaacttagcttccattttggggggaaaataaaagttccaacttttactaagcattaaaaaaaatctgtaggaatacaactcatttatgaatttcaaaatgtttgcattttaaatgcaaccagaaaagaactatttgaataagcaggcatttagaaatgtaactgcttctaatttgattggtcacataaattcagtttttttgcaaagcagatttatttaagtcagagaacttacaaaattgaagctcagcagtgagagttctccatcacacttcctaatccatgatatttcattgatgcattgttcatttggaagatggagatgacaccagtgtctgtgtgtggatccaaatatcccagggggttcaacagcacctcacttcatcaaaacagagaaacaacgagagagctggatgaggcacctaagatgacagctagaggtaactagatgagttgatggcaggtaaacgctatgataacaagtagaaaggagccaataaatactgggctggagcagctcaaagactcctgcctgcttctgaggtttggatgatccttctaacctttaaaagtgggactgaggaatctccctagacagtttggcacaaacatctgctcgatcagtgcaattgcttttgtgtgctgccttttaaaaagcaaaatatttaatggcagtaaaaaatgtgtaagaaatcatcctggagatacaaagttgtattctgggatttgatgattttgttatgtcacagccaagttagtatttttagttagccttgttaagcccttgaacaggtgcttggagctgtgtagaacatagaccaggtctccagtggtgaatctgactttgccaaaggcgagcaggtctcccggccacagccgtaagtctcaaggagtccatgtcttatggaagtttataaggactcatttctgccagccatggggttggatggcagttacaagaagggcatttattgggatttctgggaagtcaccaagatcttccattaacccccaaatgtccatttcttctttattttctctgattcctttgcttctttttcacctgtacaagttcttcttggaaactatgtagaattgtctgggtctcgttcattaaaagtgaaaaggccttcatcacttccagagttttgatttaggccaccgttgaagggcttcacttttatttgtaaaacttacctatcagtaagaaaaaagaattgagttttcatattaatttcttatgacaaacaaagcaaaacaaagcctagaggttatcaaactattatttaatgtaagtcagctcccacacattgcttttacatcattacctcagtacgctaggtcaagggtgctttgttgttgttgtttgtttgtttgcttgttcatttttttaagtggggaaaactatggaaatgggaagcaaagagatactcctaatggtttatttaattaattttactatttggtaaattcagataatgcacacagggccaactataagcttgaaagctggtattaaaggtaccattgcaagaagattctgacagttagaggaactacaggaaagtgtcttttcataatatgaaaaaagagatccttattcttgccagtatggtttgggttcactaatacctaattatccaccatcattgacttttattatgattggttttctaataggtgatattaatattcagtgtttgaatatgttccctattagcatgaggaaaagccaataatgtgacactaatatcatatttaatgtgatttattattttaatttttatgatggcttttgatcattccatatttttatattcacgtttcaaggttgttagacttttttttcccaattacttctgtttttgcataatcagtgtcattttacctaatagcatctctcttagatgagtaataatgctccatcatgcctctttaccaacaggaagattcagagatattaaagtgatttacctaattttttggaagttcctaacttctgttttgaggattggtgctttccttcttccttccctctatttctcccttctttttgttctctctctttcccttgctctcttccactcttcctcctgtactgttattttcctccctgtttttcttctttcctctctccctccctctctgtcttccttttctttcctccctttttattttttccttctagagtaaatagtattagaaaaattagtttctgcttttttaaaagaggaaattgtacagtgtaaagtgatcatttatattcaaggaaaatgctacctaggacatgccttatctcaccccagttctcggtgctgctaagagggtttgagaagcatgggataagggtggcggcaatgtggctgcaacagtgccaggtgagcaacccatgtccgcacgcctccactctcatttcttgtctggactcaagaccccagtctaagagtggcctataattctcctttctgattctctggcaacaggtgaatcccatgatccctgatgttgacatcaagcaaaagaagccatggtctctagccagtagattaacaacacagcatcttgggtgctacagcactaagataagcttaatcatcttccattatttcatgaggttgattggaatgagtgtgtgattggaagggaacagatggggacaaagagtaaactctacatctctaaaatctaactcaacatctttttctcaaacctgaccctttctccagatgtttttgtttctgcttcatttcagcattcttccttccagtcacgtgtgctcaaagtgccaaagttatctttgactcttctgtctttccatcccagtttcataaatttttcctttattctgtttgtgcaatccatctcttccactcaattttgcacctctatttgcttctgccctcccttcaccccacaccaactgttgaggcttttttctttctttggccctatctctggatttttcttattcaatttcatttcaatgtccgctgttagtttaatgtactatcttggccaaataagctttcactccaaatccttcagtgtttttctattagatacataataaagtaaaaatttcttagctcagagtataaggtctttgataatcattccttactcacaagtcctttggaaccatccaccttctaacaaggtaagcctgccttcttgattgctctctctctctgagcattggctattacgattatctctgcaagtcatattttcacacctgccctcttgtgtatgcatgtcccccccatgcacatatgcatgtacccttgcctctgaccttcccttcatattactctctgaattacaagttcctgataaatatcttaatagtgatgctgatgaagagaaagaatagaacagatttaaaggggaaacttctgggatggctttctggccagaggcttatcgttggaagtgtcatacttacccttttgccattcacgggagatttactaaataaatgcaagatggacaatgtcaaatcatatcaactctcctaacagtgcagcaaacgtaatataggattgtgatatagcattggtaccaaaaatgtgaaattatttatgaaaaaacattttctgtctttgagctaggagcatctattagaacaagaaaggaaaacaaatgcctacaattttgggtcttttcatatcaacttggaggcaaggacagtggcttagtcctcttgtaagatagcatctttcttccattgtttgttgcccaagctctggtagacctctcagctttttatggcctgccagcctctaccttttccccaggagttgtgatacttacagtattaaccaacaaaagggcacaatgttttacatcttaaattattcctcttgcacagtctgattaaagcttgacaatatgaaaagcagatgacagggccaaataaaccagccatcacttgaggtcacccaccattttccagtgtaagtggttctgaaggagtatcttttcttactttgaggttgctttagagacatatagctcaggtcttaatagtcagtccaaactctcattcacagagcattacacaagtgtattccaccctggtactttgttgggtttctgttgaatcccaaaacactgcttaaactcacctcaattacagggtcagcagtgcatctgcaggcaacatggcttctttgttatccctggtttgttttccctggctcagtgacagaaacttgacagtccagtgtaggttaaactgaatgagcattttgtagcataggtgctagtcccaagtctctccaaggacatagggctcaagtagagtagactttattaatgtccatcaaaggtgaacctagtcttcaaaatgctgcctgtccctccaggtgcatcaaagctactaattaccattcttccttccttccctactttggatgggcaatgaagaaaggagagagggtaaatgaaagatattctctttactctgtaatttgatatcacagtaaaatcctggaaaagatgttgttaatattcaccaatgaccattatccctgccacagtctacccactaccacatccaccaatctcagagtgctttgaacataggtttcaaacataagcagaacactggaagtatgtgccaaagaaaatgcatttgaatgtggtccattatttaggaacagtgagtttccaaccttatttgtctttctgttgtctatttttgtcatttcttttgtcctaaaacaaaaattatttttcttttttgaaacatttttaaaaattctataattatattaattcattcatttacttatttatcatttaattaacacaagggttggcaggctttatctgtaaagggccagatagaaaaaaattaaatattttaggctttgaagaccgtgcagtctctgtcacaactacttatatctactgctgagcatgaaagcagccacagatagtacataaatgaatgagcctggctgtgttccaataaaactttatttacaaaaagcaggaagtgagctgttgtttcccgacccccaaattaacatatttgactagctcctatgctttcattaccatgctagcttcaggggacacagatgaatagaactttgttcctgccttaagatgccaataggttaatgtttctggaaacaaggcaggccttcgacaaagtcacttttggtgtccttctatctctctgctgctccttttcctgccactttctcagacctagtactgtccactctgatatgccatccagatgttatgtaatgccatggtattacataaatgctctcccattcctcttctattgcaacttgctgactctcagcacattgtcttcaactaactggaagacataataaaataacgtacatcaaggagggaatcactggcagtagcttaatttgttcatccttcaggagttcttacatattaaaagaggatattttaaattcacagacatctacctctacttgtaaaattcccggcagaggactagaggaaatctttctgagcagggaagtccatgacaccatctaaatctcacagaagtgaacataaatttcctcctgtgactaatgaagataactcacatgtattgagtcactagcatagcagtcattgccctaaatcttccaggtaagatttactttgagctccctagtagctctatgagtcaggtgccattattagtatccccattttacagatgagaaaaccatagctaagaggggctacataacttgataaaagtcacacaactctcatgtgagatcgtatttgaacctaagtagtgagcagccttaatactgtaattatgaagaagcaagtcttctctaaatcagacatagttgagctctattatagaatcttagaagaggaaggacaattaaatattgcttagtataatcttattttaagaacaaggacaccagggctcagagagcgttttggatttgacaaagtagcttcagactgctggaagtaaaatgctgttcttaatgagttttttattttattttatttgtttttgtttgtttgttttggtcttagtaccacatggcctcttgacagtatagcaataaagggaacatgaattgattagaaaatgattccttcccgctgggacattagtctgtggaagactataacatgtgcgactttgctcttttatgctcccactcatctttaatcatgggcctactgggaacacctcattgcccctcattcactgggtggttgagtcttcgtgaagcaaacccacatgagttgttctatggaaggggagagcagaacggtgcattccatcattaaaatttcacatctaaacaccagtgcctgactatgctttctctgaatttcccatagggttattgaaagctctaacaaaacgtagttaaggcaaaagatagctgtctgttttataaagaatgtaaggaatttcccagtcagatggctcaaggaaaggctttacccgagcagtcctactttccatagcaaattccagttggttagagcaaacactgtgacaatatctattgttcaattaaaagtagccacaattatacaaaacataccaccatatggcatgtccttacatctcatgtatactgtagatactattttagcttcttgctttttctttttcttttttctttttaatttttttttattttgagataagagtctcactctgttgccaaggctggagtgcagtggcatgatcacagctcactgcagcctcaaccttcagggctcaggtgattctctcacctcagctcccaagtagctgggactacaggcatgtgccaccacacctggctaatgtttgttttgttttgttttgagagacaggttttcaccaagttgctcaggctggtcttgatctcctggactcaagtgatctgcctgcttggcctctcaaagttgggattacaggtgtgagccactgtgcctggcctagcctcttgcattttctatgggtgcattttcataatagctttttaaaatcaaggtagatcttagaagtgaaagaagatataagaattttatatattcttgagatataggaatctgatagtttcagttgtcataaagccagtggaaattcacagcttcaatgcgtacatcatgttgggaatttttctcctccactgtttctcatgagggtgggtttatagagttaaatagcaggggtatcttcaccaactccactgttggcattattttctttgaaaaaagtgtgcagagagatattatataaacaatatgacaaatcccttctccgtgggccaatttagtaaacttagagcagagaaaaactatagcttcttgctgctagaagtattacgcagaacacagatagctcttttcagtttcccataccgagagtcaggtaactgagtggtactcaattctcaaagcaacaagaaggctgaatattctggaaatccacaatgtagtagtaaaaatcaggtgactttggaactacatgaggaagaacaataaacaaattgctaattattccctgcctgccatcatttttatttactgagatttctattcctatctactttttgatttattgagattttaagggaatagaattttgggggaggttgttcagcaaatatactgtcaactcatatcattctcttgattttttatagaagaaattgaggtgcaaaaaggttaagtgctcagtattacattgttattaagtagtttagctggaatttgaatccatgtcttctcattccaaccaagagactttgttgactaaattaggctactctctatggtaagtatatgggcacaggtaggtgtaagagtacagttgtagtggtgttagtggtagtggtggtgaaggaagaagatactgctcatctctcctgataaatgcttacgagaatataaataacaggattattatgtcagttaagaataggcttacctgtaaacaacagttttctcacaattccagagttaagttattcagggttggtatggctcattagcattgtgaaaaaaagatctaaatatcttctctctttttgccgtcttcattgtgttggttgtggcttcatggggacaggatggctgctgcagttccagcaagcacaactgtgttcaagccatccatgtctttgctttcttgtttgtttgtttgttctgttttattttgttttgttttgtttttaagagatagggtctcactctttcacccaggttgtgcagtggtgtaatcgtacctcactgaagcctcaaattcctgggctcaagtgatccttctcgcctcagcctcccaaattactatgattacatgtgtgagccactgtgtccagcttcatattgttgcttctgataggaaaagctgatatttatctagagtccctaccaatctcttctgctttcatttcattaattatcgctgtgccatatgatcaccccagtatcatgggagtggctatctcccctggggctgggccctttgacttccccaagcagacagggttcagttaggctgaaaagggaggaaatggatattagacaggcaatacaaattgttgacacagttcctaatagaatacagtcaccctccttctacaccccaattcagaggtttggtttcattgtcaacagccaccatggttttatcctggtgattttgtcaagctgcagggaaataaaaggtagctgctctgcaaaaggtgacagaccctgatttactacctgatatgttgcttacactcctgtggtgtttttccagaaagaaaaatgaacctggccctagaagtctcactttgtggagcatatatctagcatgcaatactattctactatccctcctgtttcctcgagcatttcctgaacattcctctttggttattttattatttctctagaacatatataatttcagaagtcatctccttttatttgtgcctgttatccagtctttagcgtagctagatttgagccacccaaatgatggcactcttctttctggcacaataagcattttaagtgaaagaaagagtattagtagtctgagtggttgttttaaaactaaggttgactacataacaccatcccagatttaggccttgttgtgattggctttttcttgcactgagaaatggatatttaatgaccatctcactatgtcatagatgcacttccttaagttgaaaaggcctccaaggactcttcccaggagaaaaaagaaaatctgagttggagcttagcaacatccagttctgcatcaagcaggcctctctgctatgagaggggtcattgtttcaatcccctttgctgtggtggaccagcagctgtggaacccacccatgttcagggaccagcagcaatgaccaggaaccacgctggctgactcacacttaactgccctccaagaaaattcactataaaagaagtcaggaagttgaaaagaaagacggttttccttcacttagcttttctgcttaaggcttagaatcatcctgtatttgtctcctacattgaaacaacaaacctatttaagcaacctataaaatataaatagattttctgtagtgtagtcggtgagctttctcaggctgagttagtgtggcagctgccccagtttagcttctgcataggaaacaaggctctgctgaaaatgctgaaccccaggacaccctcttccttagtgtggctcagcacagatgcttgttgctttctgaaagcatccactgaccccatgacttagctgcctgaccctcctggaagtaccatgacacacttcacttttgttttgtctttttagaacttatgtcatcatttggggttgagcattttattgtgaaggctgcctagctcactgtggcatcctcagtgcctcctatccaatgcaaagtcaatagatatttttcaatttaaactggttttgtaagggaagccaggtatgcaggattaggataaaaacaggaataaggggacttctgggagcagttaatggttgaatggaaggggggttcaaggtgccatggctttgggtcttttctccattattttgagatgccatcatataggctacctttggttattcatcctattccattcccaataaatgaacacatttgcctttggcatatttgagcatgccctatcaaaccatgagagctttggtattaaaactctcctggtcggtgtccgggttttaccagaaagcactgactaagaaaatggagaagcatagttgcaggcctctcatttgtgccccatgagggagggaagagaaatgacagaagtctcacagctagagatctcacatctacttgtgtcccctttgttagatgtaaagccagccacatgagattacattcaccgtcggcaactcaggtaacggatctgaagggcagcttgttctttttttttttttgagacggagtcttgctctgtcgcccaggctggagtgcagtggcgccatctcagctcactgcaagctccgcctcccaggttcacgccattctcctgcctcagcctcccgagtagctgggactacaggcgcccaccaccacgcccggctaatttttttgtatttttagtggagacggggtttcactgtgttagccaggatggtctcgatctcctgaccttgtgatccgcccgcctcggcctcccaaagtgctgggattacaggcgtgagccaccacacccagccagcttgttcttaagaaaggaaagaatacaagccaaagcagagcaactatctttcacgggggctttcatagaaatgttttcatcggtacagtttggcaacatgacctccaaggacaagggcccttattccactaatatgagctatgatggcttagtggttaaaacctggagccaaaaagcctgggtgcaattacagaaccacactttgctgctagatggtgctgggaaaattaccaaacctctctgtgtttttcatctgaaaaattgggatgttaatggtatctatgtcatagggctgttaagaggattaaattattaaacaattgtaaaatacttagaatagcaatagggttatagtatacatgtttgttaataaattaccgagcctgaataaccaagggctttgaggccgactatagaaaacaatagagaaattgtagttataggatccaccaggtagatttcagagctggacaaaggtgaccaggcggtcagatggagaccttgggggaatgatcccagtgatggatagttgagatgcagatcaacaactgaggctgggcattctacaagtctgaaactagcaaggattgtgtgaagtttgtggatgttaagaaccttaaatttcctaaatatcatttattctttttgaaacaagatttgcctgtggaaatgctgtgacattttccaagctgtgcttcccctctgcaccactcatgacctcatactccttggcggcattttccaggtcttggtaacctcccttgaaaagagaaatatagttcagattcgcagcagtagtctaagccacacagctgctatgggtcaggggagatcaattacatttcctggggttctcttcaatgggcggtggtcttgtgcacacggcattatagatactcatccttggaacctggcttgttgaaggttctccagaggcaagaggaagttaaaagataaacttggctgtgtatatcctatttcataactgcctaaatagtaagcatgctgactggcaagaattagaactataataaatgcaattaaattgcctattacttgcataattgagaactataaatattttaaataataaaattgtgaaaaatttctctactaatgctctgggaatgtcttaaatctgtaaaggccaggggattcatagggatggctgaatatgaaatctttccattcatctctttgagatcaaatatttttcatgattatttcaaaaggctccaaaatggaaaagagtgaatatgtgagccgccatgagaaaggaagcccagaagagtgagtacagggtagtttttctgggaagatgtatttaggaaatggggcaagagcaaagaataaagaagtgcaaaaatagaactaatttgacactgcatatgtgtccttctccgttgctgtacatccttttttgcttccaaagggcataatttgatgtgattaaataaggccttctgctttaattaggtatctcagtccttgaaaattctgattaactttctgtgtatggaaggcaggagatatttaaatatgttgagagaaatacaagagcaatagcaaactaataatctgaagagaggtcctcttaacaggtgttttttttgttttgttttgttttttgtttttttttgttttgagatggagttttactcttgttgcttaggctagagtgcagtggtgcaatcttggctcattgcaacctccacctcctgggttcaagcgattctcctgccttagcctcccaagtagctgggattataggcacctgctaccacacccagctaattttttgtattttgagtagagacggggtttcactatgttggccaggctggtctcaaactcctgacctcaggtgatccacccgcctcagcctcccaaagtgctgggattatagctgtgagccaccgcgtctcaccttaagaagtttttaatactcgtacataaattcaaaaggagaagtggtatttgttctaatattttctataattcagttttaatatattggcatatccaagtgtgtttgtgtaggtctgtgtgtgtttgttagagagagagagagagaaagagaagaagaaggaggaggaggaggacgaggaggaggaggagagagattgtattattcaattacagcagacactgttagttttctgtgtaatacccacttttacttctttgttaacaatgaaatctcaattttatttgggatggaaatgtacccaggtgtgaaaaaacacatattttccagactcctttgcagctaggtgtcattgtgtgtcatggttctgggccatgcggtctaagtggaagttttctggagattttataaaaatttttgtctcttaatatgagcagttgccctgatttcttgtcctttcattcatcttcttgcttggaacttagcccatgagattgcagatggagactattacaatgaaaggcccatcctaaggatggcagacagaaataagagcaagtccagggcattaatgaatttgtagaactatgtcttcaaccgttatgggagaaaataaattcatatttgtttaagccactcatgttaactataatggtgcctacaagggaatgtataaagcaatagagcaagaggagtatcagcaattttcattcattaaagatctacttccaggactcaaataggcatgtcttatatttgatgcctattttggtggacatagccattttgaaatttacagagatccaacccatgctacaatacaatatttccatctttatagtgcttgagagtacatagatgggctgtagacaactaatatgtctgcatacactgtattcacttttggaataattctagtttttttgtttttactgagtagggacatcttgatagaaatttattaacaggattttgattttatgtaaaatgcatttaacttattttttatttgctgttttctcaatatcttatatatttagtattctatgttatattttaagggaatcttattggcacaattgtttttaatgctactgtgtataaaaaagaacacattttagaagcaaattgtaattagtaaaccaaccaatgttaaatgtttaagaaactgtaccagggaagaggacatagtacaattacagtagtactgacaattacggtaggaccacacatgtggatgccaatttatatttttacccactgcaacctctgggccaagaggtgaagttaaaaaccagtctctggctgtttcagagagttactactccacctgcttgtaaaattctgtctctttgaggtttttgccattgaactacctcccctgttatctacccacttctgcacactaactttcactgaccaaagactttcacttaaacccacagtcttcctttctctctattccaggccttgctgtcctcctgggttatttctgttttcatgtgtgcaacccattcagtagcattgactctcatttgtgggatatcatatcgttccatccataaagagttcagaatccacctccaaaagatagaaactccatgaagaaatagccaaaaagtagcaagagtctaaatatctatcagcaaaatgtagtatatttatacaatggaatattattcagtcataaaaatgaagtactgatacgtgctacaatatgagtgaaccttaaaaacgttatgctaggagaaagaagccagatacaaaataccacatagtgtatgattacatttatataaaatgtccaaaataggcaaatccatacacacagaatgtgtattagtggttgtcagaggataagggcagggggtaatgaggagcgactgctaatgggtatggggtttctttttgtagtcaaaagtgttatggaattaggcagaggtggtggtggttgcacaattttgtgaatatacaaaaaaaaaaaaccacactgaattttacactttaaaatgattaatattatcttatcttatgtgaatttcatctcaatgaaaaaggagattgagccagttatgttgctaagtttggaggaggtcaaagcaaataaggtcttctctttaccctcaaataactcatactgcgcagaggggacttccaatgggcccagcaccgtggtgtggcccagcctccaggagcaataggatttcctctcagatgaggatctgtgtaggatcaaggcagaaatctctactgaagtctgtttgtgtcacacacttgtgcatgcctgccttggagtctgagctctagctttgtcccagtcttgtcgccttctccaccatggggactttgcacttgtactcctttctgtgggaatcctgtttctttactcctcctgtctcgttaattcctcccaccttgcagattttagctcacgtgccattgccccagagaaatcttcctaccccgaccttcatagtcaggttcaatcaccaactgtccattctcttgctctcttgaaattctcctttgcaacagcttttaccagtttcccacagctgtaattctttcactcagttgtcttttcctgccagattttgaagttgttgagggtaggtactcttcaaaacagcaggcaaaggtagtactcagcccacttttgctcaccaacataacttcagcgcttcttagtgtctgacacgcagtaaggactcagtgaggacatgatgatcagctgagtgagtgtctgctactgtctacccagctacccaaagacatacgccgttagggacttccgagaggagaggtttttcccctctggccttgacaggtcctttcactgccacatcctttctcctctaagttgccatcatttgatcatcttatcctcacaggaacccagtgaggtagtttgatgccgttgtcatttacatttgaatcacctgcaatgcaaagtgaggataggatgactaaatgattaccgtgctcagggaaagtgtccagcattattttattgggctgttaggtcatgtccagtttgctcactcgaatacttcatcatattctgctgccaggcctataaatgtcaaatagtaacaacccttgacctcctggcccaaagctaagcatgttaccagatgagcctcactgaccttctttaatatgagaatctttaatatggattaatcatattataattatgtatttgttctttttattagagtccttggggaatgtcttttaccgaagaaatgttatcttacagggtaataagaccaaatgggcttttattttttaattaaaagaagatgaaaagttctgcttaaaatacttttaaaatgccttcatcttgaaggtaaatggcagacatgtatcattttgcacttatataaactttactaggctgggcaattgaactccaaaatgaggctgatagctaatagaacatttgtggaggagacaaacaaattgtccagaataaacaaagcttatgtttatttttaattgatagcagctgagcacagggaggtgtcattagctcaaggcacagatcaaactcattaagtaccctggccctcttataaatcatgcgacgtgtcgagtcttgaattaaaccaaacaagagaatggttcagaattcttcccttgtaccagcagaagcatggttggcacaaagacccttggagaaagattgagcaaggctgttccccttagtaacttctgagcctacgcagtgatcaacataggtgatttgcctgttcggagaccaagaattggagccaagtgactggttccgagtcctagctcctgcactcccctgccatgcgcagcacctgctatcggtaccttcccgttgcccttcagcctactcagggtgttactacccggctttttcacttgctggagacttcctgcaactcaggcctagaggtgttctcttgctgggaggttgtgctttgttcagttacaggcgagccagaaatgcagagttagccagctagggatgggagttggtgggtaaacacccttgctaaatcacccctcaatggaaaagttgtgttctacagagttcctcagagcacccccaacaggatggagcaccagcagccacagtggtaacctgttcactagtgtacactctcacttttcttcttcacagtgctttctgtaattgcctcccaaataagatactttttccaaaatcctagtctcaatgtctggttttggggatcccaacttgagaagctctataactgttccttttattcctaggacagtgttaaggaggctagaggtgggtagagaggcagcctagcacggtgcttaagaggacatgctctagaggtggactcgctggccacatcctgactgccactcactaggcacccagcctctctgtgcctcagtttcctcatccacaaaatggggtcagtgataataagagtacctatttgatgggcttgttttgagaattaaatgaatactaaatttatacttttgaaacactgcctatcacataataagtgctcaataaggtcaggtgtagttactagaatcacagaacatcagactggggaagaagtttacagattagctagtgcaacctcttcattttccatgtgaggcaactgaggatcaaagagacatggagtgatttcctcagggtcacacagctcatcagtgacagcaacaccccaaagtctctcagcgcagtgtcctccatgctgcgaaatcagcttcaggacagtcctacttccaaatactctgttaacaaacagaactcggtgtggtcatttcaatttgctgggctttttttcttaatttaggcaatgcaaggcaggaatgtgcaggcattatgtaagattttgaggagtccatgaatttaaaaccagaagttttttaaggggaataaaataaaaatcaacttcacaatgccataggcagaatgtcctcttgaagaatctaagatttagacacaaatactgtcttctgcagagtcctttacaaacttctgcttaacctcctggcatcaacggacgacaggttctggctgtgcagagtggaagtcccttagagtatttgacagcatttatctgataacagctcccagccttggtagtattcacttgtttatggaggtttgtacaagacagaataaaataaaaatgcatgtttctataccagccctttgctttttaaagtcttttttatctacggttccatgcaaagtcacatgttctcttcttccttttgatcttaaatgaggaaggggcaaagtgtgtgaagattccagaagaagtgaatcggagcaaagtcctcactaaatgaaagcttcgtcttccattcagccgctgagatcagtggaataaaaccacattagagatgatccccctggcccttagcctccagagagggcatctttcagtgacagtgaatgtgctgctatataaatacacaaagcattgtggaaaggaaagagctctgtggtatggagacttgtcaatatttgtccgaaagtcatgtttctattatcttcaagtatgtctggcaaaggaaatctggagggaatcttttaagaggtaaaacacgttgatttgtgaaaatgggatcattttatctcttctgcttcaaggtaagctctttggtttcacagtaactagttgccaccagatcaagttggggaatatttattcttttgcttcaattcctaaaagattgatattaatgcattaagcctctttttttctttatactttcttcttttctgcaactgataattaaagctataagaaaattaaattactattattattattagaaagctcccatgctagccagttctggttggatataggtcagctgtgtacaaatggacacactgtgaggctttgtgcaataatataaccactacttgagaccaaatgatgggtgatacatatcctaaacctctccctcatcatttttatggttaaattacaatgattgagcatcaagcttgcctaagatttgactactctacttctttgccttattttctgtatattaagttgcagggaaggtttttactttgcaatttatttttcctcttgaatagtgattatgtgaagttctaagcatcacaatgctgcagtgtataattcttcaaagcaggagaatcagagtgtagcaatggaatgcagaaaaaagcaatacgagaaaggattatttgtttgcatctgtaagaggataaagatggtttgaacatttgcttcatatggcactgatatgagcatacttacctcatttgaggtgaggtttccccagaagcagacagtgagaccagtgaatgcatgtagttgattttggaggtgatgctaggatgcactgataggaaaatgaggaagtgatcatgagaatggcaggatccgatacagttgcattattaaacaagttcctagaggagggctccatccccttgggattcttctgatggactgcatgagcacatctagaattgtccctcttgatatccatcacctttcttccatcacccatacacagccagagagtcacaggggcttgcaatgagaaggcactgatgtacatgggaacagtgagctttgaggggccacgggtgaaacatcaacagcgtgtgttaagctagaatgataactggctggttgaactaagtaaacaaatccaagtgcaaccttggaacctgggatattaaactggctgccaacattgggcctacctgttttctgtcttggtctggatttattcctcgtttccttttatttctttttctttaaaaaaaatcttttttccttctagtttctctataagattttttgagaatgcgtagatatacatgatggaggaataataaaaacactttaaagcaatagatgattcttaccaaacttacatggataaatgtaataggagacacaatttcagctgaataaaagccttactccaccactctccaaaccccagaactgttgtacagttagctttttagtacttacgactatctaatggatcttgacaaagagaaatataccatagcattgcattaatttttgagcagatagtatattttgtaattagatttaaaaaaccaatcatgtcttttgttgttaatgggttaccttccttcggtatatttgatgaatatcatctctcatggctgctcctgagtcagtctcttcagcaacctgttcctcctttgttactttgtttctgctcacaactttcagctccatcaacagtcatcaagtccatttggcaaatattgttagcctctggtagtggcgacaatacatagaggtgaaaatattctactgatataccactgtcatattaaactctatgttgcaatacaagcaattctcagactgaattctgtcacacacacacacacacacaaagcatcaatgaggaagtagccacaaaatagtcatccagtcttatcctgtaaacttagtgatgttcctccatctgcaagcacgcttgcaggaaaaccaacacgccttgcaggaaaagttcattttgagttgccaaacctctaggcaaaccaggctgtgaagtcacccattcaacatatgatcatgagaccagacagagctctggacctcggcttggctcccaagatcttattgccagaggctctagattctcatatatctcgtgcaagagcaatggtgccgtacaatctttttaggcaacaacatatcttgaacaccaatcgtttcaccaattgaggcatatttctaatatatcgtttgcttgttagctaaacttatgctattcaataataatagtggatgatgtagtcatctttggagggtgagtacctgattagaatattacatgttaattaattgccaccaggatatgtatttacacacacacacacacacacacacacacacaaagctgagagagagagaaagagatttttaagctaccaacacagaaattctttagaaatcatgatttacctttcctgtcaaaataatttgaaatttcctattgttaatctgaagtttcagtaaagagaattttattattcttcacatatagtatttctgcttttactgaaatggcttgctttaggaatttgccagaacagattttatctgccaatgggaaaaaaaaaattagatgttgaaagtcctgtttgttatcccgtcatcaaattcctcttttcaggtaaattttgaaaggttgcatcctgccagagagattttactgaattttctcatctgtctttgaaagctatactttatcctacagataaaactatgattgcatggatttgaacaagtcttatagaatcccttacatataatgtttagcctaataagattggtattggaattgtccccaaattatttagctagtacataatgctatatctataaattgtgataattttatgttttggctacagttgagttttagactctgtatgcagctggggaaaaagtatgacctactgggaagcatcagtgttttcttgcaagctcattcttcattttccaacccataatccccctctgctactcaaggaagctgaagcccaggattaatccatcggtgtccaaaggcctgcaggaggtcaggcgcagatggtttaatccttggtgctgcttggaatcatgggagtgggtgttggatggaagtgcctctgatctagctcttgctgtgggtgtcttgcacctcttgacacacctgtggctgcctggaggttgtcagcaccacccaccactctcctccctgccttctccgttgtttagaattcttgctatctagtgggtgacaaagaatgtctgaaaagttcagttgctaaatggatcaaaattagtttctcactagttctccaaaaggtgcaagtgctgttggaaaaagagctgtaaacaatattagttgttgctgccagttggagcctcataacaccttataattttatttctgttaatgagacacatgaggatctgtggagttcagtgggatataattttgcatatgcattattaaaaaaaagaaaaagaaaagctgacataagggagataaaagatcaagaagcgaagaatttccagctcatttaatagagacattgaatacccttatgcattgccttttgactatgccatctcttgtcaagcaattataaatacttgtaactaaaacattaaagcatagaggttaactaaacaaagcatcagcacattgcaggctaaagaaaacccttgtttaaagtgatttccattttgattaatttatccagataaaccatcaatttcccaaagttggagactccgtagatccagactttgttttctacgtgaaaactgacagttctctggaactgtagcagagaatatggtaccatttaaattatcgagactgtagggcaaaatttcaggcctcttaaagccagaaaaatggccccagtgagctctctcatgatcagttcattcttctgggaatctcaggaattactatgtctaatgactttgccagtgggtctggcctgtgtaattaagatctaaatatatctctatgttcattctataactaaatttcttatctggacaaatgacccatttatgaaagctcataaaatatcatagggagtcattacatacttaaaaatctctctaataaaatgtgcccaaagatggtcatatctgcattgctaataattttccaaaaatatgccttaccataagtaactagaaaatactgcatattatcattcaagagaagaaaagtagaataaagatccattagtattaaaaaagtatctttccttgctttaatttagcgaaaatacttgcatttttcttctgctctttcaattcctggatgtgctagcacagccaccatcacatcaacataatcttgcaagcttgtgcattcactgcagaaggcaaaatgtcatggcatttctttatgaaaatataaaacttttttttttgacggggcaagtttcgcttcacatcaaaggtaaatgagaatcaaggttgaaattgcaggcacttcagaattctgaatggaatactggagtgaccagactaaaggaaatacaccatatgtaaaggaaacattaactctggtattttattcccccttagtaatttccgaagttattgattagtagctctaatcttatgaaaatggttcattgtgtctcattaaggatgacttcatcttaccaaatcataacaaggaaggagtggaggtagagatagtagaggaggatgaaggaaggaagacttcccctcagttagaaactacacaagggagaaaagttatatgtgattggggagtgttatttaatgtttactgagagttccaagaatctttagtgggattttaaaaaaattgtaagttatctggtgatttatggttcaacctgaaggcaggagacaaaattcatatgtttgtgggattttttaaagttcataatggtctatgccttctaataatgacaaaattcttggaagcctctcagatcactgaatcatagtctttagaggtagttctcagaaatcactctatacagctctcaacctaagaagagccatttgcaattctgacaagaaacgataccttagcttttgtcttagctcacacagaaaagcacctgaccaattgacttcctcaccaggtagcatgcccatgctattatatatgtatatatgttaacgtacatgtggtttatatcatccaagtaaccgaagtcaaatggtcatttaatatagaattggaggcaccatagagcagctgagtcaagcctaaactgaggttatatatatcattagatttttttaagtacaaaagactaaaagtgcatttctttcacttttactgccacttggagttaagtttcctgtaatttgcagcataggacactttactgatataagggtcaccatcagtacagggatcagaattgtgaaagttcttagtttgaagaatcagtagtctaaaactcttgctactcagactgtaatcccaagactgtcagtattggtatcatctgggagcatgttaatcatacagaatctcagaccccaacccagactcactgaattagaattttcattttaaccagatcctctggtggcttgtctgcacatttatgtttgataattattctggctccaatttttggaatatattgactgtggtctaagctgtagacgtgtcatggacaggtagaaaccgataaaattgccccactaggaaacaattgagtctgtgataatgacactttatgtgaacagaaggacgcatgtgcttatcaggatgagaggagttaggtatttaaaaagggcagtattgttacaaggtacaagtatagagcacacgcttcatcatccagcctcttcctggttatccttaacctctgtgtagcttttgaagatctgccacttcaggtatccgtatacgtgaaaataataatgccctactccttgccttcccaaggttggaattaatgcaatgatatcatgaaagtagagcctgaagtagaattattttctatttacttgcttctaaatatgtccacagatcagtaacattagcatcacctgggaccctgttagaaacataatttcagcctgccccagagaaacggaatcagaatttgcattttagcaatatgcctaaatgattggatacacattggcttttgacaagtgctggtccatggcactttgtgaaccagggaactccctgtacctggagaagtttagatgatgcttgggtgagtcccatcaaaaatggtggagaggggagccatgtatggtgcatgcggaagttagaacaaataactacagggccagttgcaattctgagttagatatgtgttcttctagaaaaacactgaaacaaagtttaaagtgatctggagtggtcaaaggaataatttacagattttgcagctggatgtgagctagagatcccatgaagatatgttagttccaaaaggaacacattttgtagggtggggaaattttggtcagttctttggagcttgtgggaaatacatctctagtgaagaagtcttgtctaatcattggcttcttacttgtcctcaaaaatgttcctcaattacattaagtgatgtttgttactaacaaaactgtcattttccatgttgaaggatgtgtcccactttcagagaatcccaaaaattaaaaacagtggagggagaggaaaagtgatgggcagaaatccttccacacactttaaaggaatataacacttggctgtagtaagttttatctgagatagagttacaatctgctatggataatttttattttgttcatccttaatcaagatgcaatcataagattgtgatgaaaaattaaattcatcactttgtgaaattaaacttttgatgaagtcaaagtctagcagaactagtggcggctaaaagtattcatcaagtcaatacttgctccatccattcagctatccattcctccttccatcttttcttccatccatcatccatatatccatgcaataagtgaccttattacctttctaataagaatgacaatctagtgtatggactaagttaactccctaggagtagaaagaaattcactctctactcttagtgaatcctaggtttgtcacattttgcaaaaccaaatcttctcatctttatggtttgctcatctcccagtgtgggagccaaccctggcccgctagagcatttatttagtgaatggccagctgcttgctcccctccttgtggttgctggttggattaatgcagtgaacactgagaaatgtggagaaataacttacctcctggggcctgagctgtcatatctccttgcagactggctgctccccatcttgttctttttgctcatttccataatagactctggttgataaaactcttcactgtgattgatggtccacaaagcacagccattttcaggccacgagtagcaatttttaacttgggaaatatgactacaatcaatttctttctccttttcttttcttgctttcttttattttagtcatttctacagggtgtgtcctttagacatctctttcttggtcattattccctaattaattcccttgttaaatataaagtgtgcattagccttgactgatgtcttcctttgtgactaaggaaagaagaatttattacctttacgtattgaatcaagctgcataatcacaattcatttgtttaaagccctcattcttcataaaccatactagagtttaggccccctgcagctgccaagaggatctcacctgactttcataaatatgatatggagtcaggtgtttgcacatgtaattggtttaaaaagtggctgtattggctgggcaaggtggctcacgcctgtaatcccagcactttgggaggccgaggcagtcggatcacgaggtcaggagatcgagaccatcctggctaacatggtgataccccatctctactaaaaatacaaaaaattagcggggcggtgggggggcgccggtagtcccagctactcgggaggctgaggcaggagaatggcgtgaacccgggaggcagagcttgcagtgagccgagatcgcgccactgcactccagcccgggcgacagagcgagactccgtctcaaaaaaaaaaagaagtggctgtactcacatggaaacccatctcttcatttatgtaatgatttcaagttcacaccatgaaatcatggaggggatgaaatggaattgcccagtttgttgagagaacatgccgacacttcaagggataaaacagacgtgtcaagactctgcaggcgtgaaatctgcatatgcgttggtaaactagcaacctgctccttctccaattatgtggttctgtgacattagtaaacacagaaaaggaccttagctcatcccagggaagagagactgtgctggatatgagaaggatgcagtctgggctacaattatctggtgtagccatacaaaaaaagggaaaaaagctttgattagaaatggatagagtaatggttcgtaaagtgtggtcctgggccagatatgggggttcacgcttgtaatcccagcactttggaaggccgaggcaggaggattgcttgagctcaggagtttgagaccagcctggacaacacagcaagacctcatccctatgaataataataataataaatattagatgggtatgctggtgcgtgcctgtagttcccaactactggggaggctgagatgggagaatcacttgagtcccagcagtcaaagctgcagtgatgcatgatcgcaccactgtcctccagcccaggtgacagagcgaaaccctgtctcaaaaaaaaaaaaaaaaaagaaagaaagaaagaaaagaaaagaaaaaaaaaagtgtggtcctgggagccagcaacagcaatatcaactaggaggttgttcgaaatgcaaattcttgggctccaccgcagaccttctggatgagaaactggtagttaggccctccaggtgattctgatgcagctaaagtttgagaaatactataacggaggatatttttcttctgtttttttgggagaaagtcacactaatcttcagtttgaagacatgtttaaggctgttaagatctggtaggtggcacatagaacggttttcacactgtggatgctgaaaaagaattctcatctctaaccagttctttctcaaggaccgaggatgctcaagatgaattcttctctttcccttcttcccttgacctcactgactctgttctgcagtggaaagtgcttagaattctgagtcaaaggatcggggcttctgtctgagcttttcttcttaaccactgtgtgactctggggaggttactcacccagtctggggataagaataataataatgctttctgtcagtcttacttggttattatgaaagacaatgaagcccacggaagctgtagaatttacaaggtggtatctttcttcctacttgttaagctttaacaggggaagagactgatagctgaagctcctgagtattctgtccatttctatgatcttccagtaaatattgttgaatgtgtattctctctccctcctaacaactgttcagtttattagcagcctgtcagtgagtcccggaagaggatttgaggccaagttaggtgagaaatggttgattgctctatccatagcacctggcccataggttctttggaacctcaccactggagcctgttaagggttgggaactatttctctctgagaccgtctgtgttgctttgtgattggttggttggtgtgaatagattttcttaaaagcttctcctggaagttagaccttcaacttcctaattaagagacactggaaggtacaacttattaagaaaaccagggattgactcaaagccaaggatccataataacctccacttgggtttgtttaaaaaaccttcggaggcactggacacgtgaaagacagaatcccaaggaacactgccttcttcttaaggggcctctcactgaatcctttcccagttgtttgtccttggcagtccctcctgggttttaatccaggtctcaggggggcctttcttccttcttgtggctttataaagatttacctgcttttcctccttcttaccaagactagctggttataagcaagtgctctgtttcctctgaggttctgccaaaataaccctgcaggtttattttgctttaaaagctctactgccagccacaccaagggaaataacaatatcaaatgtcttaggttggtttcctcagaagcagactctgggataaggatttgggggaaagagatttatgacgaagtggtcccagaaaacacaacaggtgaaatgtgaagaagtgagagtgaaaggaagagtgggtattggggcaaatcccaggtgattacccaaggccacggggttgctctccagatggtgaaggtcacccttcaacattgtccccaccagggcaagggcaaggaatttgcaccctcccattcctcacccatcagtcattggtaaagggctgcccctggggagcatttgattcccgagctctatgtgcactataaaagttagttccagcatccaggggcagtcctctggcagttgctgtgaggggggcgtatcatggacaggggtgaatgggcttggagaaggatgaggcaccaactgtgtcccttagagctatgctgaggaatgctcccaggtgtatctgtcctccagagctcctgcaatcagccctgtgttcttgttcccgattcctgtgtgcaagaggcttcttcttgtcatttaaacctcttcttcagcccaggaggcccccctctcagggtcagttaggcctggcaatggccatgagctgtgggccttttagtctcgagtgggtaatttacttctcaggggatttgaaaagattgcctcttatgtcaattttcctcgggctctgcaccagcaaagtcacctaagggcgtccccctgcacttcccgcctcttagtgccaggtatgcagaatgtgcctgatacatgttccttaattatgaggaagatggagaggggatacttacaaaattagaggtgattaaggtcattgaagggtcaccatttggggaacattttcttccagtagaagctttcatattgcccaactgatttgccgttaatatgagcagggattttgttttgctttgtttttaatctttgtttcttccctttgcttctatataaagggagtttatagatgtaaacattctagaacaggatgcacattctcttgggtccagcaggtttatggagacctgttctccttttcacatatgtatgatttacagtaaaacattcctacaagtcacacaagcaagctcaggcaaaaatcaagttcttccatttgctggttccaacattttgtatcctaataaattcatggtgaaactaatccagctgtcttctcggaaaataaaaagtttgaaagagggctgctactattcatggccatgtaatagtttgttttatactgcatggagtcgaatagttataaacatgaaagcagctggcaataaatgactttacgacagctatttcaaaggtataatgaagaaaacaaaaagaaaccaagttattacttataattatagtgcctcagtgagttcgcacaccacactccaaacacttcactggccgtttctatgtgatctcatgcacagtctcctacaaagaaccttggcctttgggtcagttagccttgtgggtgggatgggcactgtaatagtgtttgcacttttgaatgcagtttttgaaggagacggcatccttttactatattcacccatgcgatggggaaaaaaattgaattattgactattctccactgttaaagagattttatattgaaaaaaactttaagaggagcaatttggtagtatttttaaaattttaaatgtgcttcttctttaacctaatggttaagtgggttaattttatttctaggaatagatcctaccagaatatattaggtagaaacatctagagtgttggttgtaacgctggatatgggagttcttgcctggaatcccagcactttggcaggccgaggcaggaggattacttgatgctaggagttggagactagcctagatagcatagtgagaccctcgtctttccgaaaacttaaaaaaattaaccaggcatagtggtgcgtgcctatggtcccagctacttgaaaggctgaggtgggaaaagtttaatagtttcagtttgaggccaaagtgagctgtgatagtaccactgcatttcagcctgggcaatagagtgccgtccttcctctaaaaaaaacacaagggtgcggtggctcatgcctataatcccagcattttgggaggctgagacaggcggattgcttgaatccagaagttagagaccaacctggccagcatagtgagaccttgtttctacaaaacatgcaaaaattaaccaggtgtggtggcatgcacctgtagtcccagctattcaggaggctgaggtgagaggatcacctcagctcagggaggctgaggctgcagtgagccataatcctgccactgcactccaacctaggtgacagagtgagactctgtctcaaaaccaaaacaaaacaaaaagaatatgggttgccaggttgcatgttacagcaaaatttacacacagcctacatattcatcaatgtggcagtagttaaataaacatagtataatcataccatagactagaatatgctattagaaacatatgaggtagatcaatatacactgacattgaatgatctcctaagacctactacatgaaaaaaggcaagttccagaacataaaaaccaatgtaagctccaatttgtatagaagaaaaatatggcgatgcttgtatagatcttataacttaatcatttattcatttatccacacaacagatatttattgagttccagacaccattctaggtgctggtgatacagcaataaacaaagcaaaggtcttcctgggagtttgcaactcaggaaagagggaattgatgttggggagactgtgaacaagcaaacaactgtgtgtcaggtggtgatgggagttgtaaagagatacaaagcaggctaagcaatagagagtaatttagctggaggctaggaagacctcttcgaggaggtgacatttgatcaaagatctaaaaggaacaagggagaaaaccagggagtatttgggaaatggagtatgccagacagaggtgacaacaaggtcagtggccctggagtagaatcatgctttgtgcacttgaagaacaaaaggagaccaatgtggctggaactcaggagcaaggaaaaagtggaagggaggggctaaggaagcgaggattggaggttatggttgtgattttgaattttattaaagcatgatgggaggtgattacagggttgagttgaggaagaggacatgacactatttagtctttaaaatgtaaatgaatgcagcggaaggattctcactctactcttggcagtgatggcctcaaggagggtgttctcagcgaattagaggagagaaagcgtgtggctgtaagagaactgttctcactgagatctgcctatacctgtcttgttttagccttgtattcatgtgttatttgtgtaattaaaaaatagaatcaattactctttatacgagataaagaaatcctttagtattcctttctgtgaccttggacaagttttctttcttagcttttctcttctccatgtttatagaaagtgggcaatctgtttttgatcacaggcttgttcatgggaatgaatcagataatgcacatagagctctgagcccagtgctcagcacatttcggtaattcaagaaatgacaacaattattgctgcagtgctgctgcctcccatgtccaaacactgtgaggcattcaggatactataaaattgcctgtctctctatcacctttatcttgagctatagagaaggataagaggctgtttcatagcatcacagaatttaatagccaaataagccatctagcccagctctgctccttttatagatggggatagagaggtgctgaggggatatactgttggctcccagacctgtagctagtgagtgacctgtgcttgtgctttccatgtcaaatctttatttcctgcattggtattttcctaactttggtcatttacattccatcttctggtttacctaatattctaattgactctttaagcaattttattttcaaaggaaactttgtatcattgtcataaatggaaaacaagcattacttgttatgatagattataataacttatagttttagcatagttatatcattgccattactacagtaatgctatataaccagcactcaaaaactcagtaatgtgcaatagtaagcatttcttgcttacatggctatgggttggttggggcacagctgatctgagactgagtttactacatctactccacttgtctgtcagcctccctggaccagtagctacatgaggcgtgttcttatggtatagtcttctcattgttctcctccaaagacaggaatttaaaagttgaaacctaaatgtcacgtccattattatcccattggccaaatcaagtcacatgctcaagtctatcatcagcgggatgaagaaaaatatatcccctctgtcttagtcagctcaggctgctataacaaataccatagtctgagtggcttaaacaacttatatttctcacagttctggaggctgggaagtccaaggtcaaggtgccagcaggtttggtgtctgtcaagagctcttttcttggtgtgtagactgctgtcttctttctgtggcctcatatagtggagaaagagataatcttcctggtgtctcttcttataagagcactgatcccattcatgagggaagggctccacccttatcccctaattacctcccaaaggctccacctcctaatgccatcatattgggaattaggtttcagcgtatggatttagggcatggacacaacattgcatttatactactcccctcgtggagtgtcttactcggttcgggatgcataacaaattactatagactgtgatttaaacaacaagcatttatttcttacagttctggaggctgggaatctaagatcagggtgccagcatagtcagattatggtgagagccctctttcagggctcaagttgcagacagccaacttatccttgtattctcacatggtggaaagaagagctaggtagctctctgacctctaatgtcctctagtggcactaatcccactcatgaggcctccaccctcatgacctaatcacctcccaaaggccccacctccaagcaccatcacagtgggaccagagcttcaccacgtgaatcttgtgggggacacaaacattcagtctattgcagaggaactgcaaaattatatggtaaagggtatgtgtagaaggagggatgaagacttgggaaaaatgtaaatatcacatttaaatgggtaatgtccatctgtttaccacctcaaaatatctttcatactcctagagttaggcataccatggtttgaaaatgctgaagtatatactgcaccctagttaacggcatgatggcacaacccactatgctgataaccaacatgtagagaaaagagtggggccaagcacagtggctcatgcctggaatcctggcactttgggaggccaaggcaggaggatcagttgaagccaggagtttgacactagcctgggaaacatagtgagacctcgtctctacaaaaaataaaaacaaattagccagatgtggtgatgaatgcctgtagtcccagctacttaggaggctgaggagggagaatggcttgagcacaggactttgaggctgcagtatgataggactgcaccactgtactccagcctgggcaacagagtgagaccctgtctctgagaaaagaaaaagaagggaaagaatggtattctgaatttcattgtttctaagatgcacatgttctcatattctaacttacttgaactaggataactcttatatttgaggtgttttacaatcacacatagttgtgatgaagcttctctgcctatacacatacacacttggttgtcatttctggcggattggctgggcaactgccatcccttgactttcagctaaccaaccaattaggggccgcctgaggaggaggtatgtgtcttgactgttgtctgaaaccctttgttggaagctctggcatgaaaaaagaaagagctacgcgcaaaactttcagagagggtggcagtggtttggaagaaaagtgcagagccaacagtgggtcagtcattaaggactggagcaacaccatcattcttgagggtatgaggataaaactgtggaaaactcctatctatgactctgagttgaaaagtgattcataagtactggatcctgaatgtgaggaagttttaggaaacaaacaatttatctcctttttatccatgctgtagaggaagatgtgcttaaaaattatctacataaatcaacaatagcaatttcaatgagtatgcaatgaaaatcctaaatgataagaaagcatgtgttatattttaactggtggagctttctcttcttagtggtccacaaagtaacacaaaataatggtgtttcttacaattgacagcttgcttgagtcagtgaaatgtgatatataatgaaaaacacttaaatggaaggtatatcaggtagcatggttttgcttgcaaataatgggaaatctaactaaaactgactaaacagtaaggaatgtgttggctaagcaattgaaaaattctagaggttaagagcactttacagttaatttacaccaacaggtcaatggtggtcaataaactcttcatctttctattcttgtggctatggaggggaaggtatgctgcttatttaggtcagtcagccccttccgatggagctgaaggtggagtcatttctacccagactgcaagactgctgtgtaaaagtggatgggatgacgatggatgagcaagagagaaagaaattcccactttgcaagaatgcctaaactgagaatcaagggtcagagagaagcaagtggtagggatgatggcttagggtttattgtgtatgttttgagacactgttagggtcaagacagagaaggctgaggagcatttccttccttacccttaaattacttagacagaaagggaagaaatgaagacggactttcaagggaatgggagacagagtctacagccttaaggatttcagtgcttttcactgcggaaggccgcagggtcctctgcctaggaaaaccagagacctttgttcacttgtttatctgctgaccttccctccactattgtcctatgaccctgccaaatccccctctgcgagaaacacccaagaatgatcaataaaaaaaaaaaaaaaaaaggatttcagtgtttttgcaaatctgcttgatatcaacatgttgggctataaaagtatttcccacttggtggcccaacctataatttcacataagaaaaaattctccactcttaagtcaaatttatttttatttttattttttaagacacggtctcactcctgtggcccaggctggagtgtagtggtggaatcatggctcactgcagcctcaacatcctgggctcaggtgattctgccacttcagcctcctgagtagctgggactacaggcatgtgccaccatgcccggctaattttttgtatttttagtagaggcagggtttcaccatgttgcccaggctggtctctaactcctgctctaaagtgatttgtctgcctcggcctcaaatgatttttttttgttttttgtttttgtctccctagaatttctgatggctgggtgctcaggcctgattagcatggagacatattgctcctgaagtttgctgaaaggagaatctggaggctcacaaatttggttgctaatgtcattctccaaattctagaggtgattgctgagttatgtgcaacacctggcatgggttttggtacaatttatcattcctccatgggatagtatttgcatggaaggtggttatattaaatgcagctttgaaataaagaaatctcatgctactcacttctgatggccccatcagaagtttattatggcagagaacacaaactatgtgctgcaaaagttgttagtttgcttgttcacttgctctttctcaatctctctctccctgtctctctctgtctgtctgtctctctctctctgagtaataaaaaatgattaatggagtaggcttagtttagatgaattctgtgcaaagttattttacataaaatgaatttttttccacaatactctatttccatctctgctttatcattgcctttttgtttgaattaatgcaataatattaccaaagtcatcctccattacactaccatttgctcccacattcaaggcaacgatgtcatttccagatgaaactatttgtccttgttaaaacagacaaggcagttggtacattcagactcaattactaagttgcatgattgattccaagacagaactgagagctaaggcaaatgaaacttgtcattaactgtgcagtatgtttttcttctgctagatctgataggagaaagattcacatagctggatctaagagggaagcgaaagggagttagcccagatcagttcccagaaaacagactctaagacagagtttagaatgctagatgtttattaaggagtgcccttaatcaatacctggggaagagagagagaggaagcaggagtaggctgaaggagaaggtgagctggatgtagacccaatgatggaccctacagacacagtgaggaactctgaagctggaaggacccttcagtgttgtactgatgagccaaggtggccaggccttataccacttcattgatcagttactggtgtgaactgtcctgagcaggagcatgattctgggtgaggtggctttttatagctgaggcagtccttgaaaatgttgatagttgaaggctgtctgctgggttctaggtcctagactcaaggtcagtgattctcaacaaggggtgattttttccccctgggaacatttgacaatgtctagaaatatttctgattagcacaactggagagatgctactgatatctagctggtagcatccaggggtgctgctaaacttaccacaatgcacatagcctccaagaacaaagaattatctggtccaaaatatcaatagtgctgaggttgggaagccttgctctggagcaacagaacctggtggacatcacagcatccatgccaggagtcatcactaatcaagatattactacttctcagacacaatgctcatgttctttatttctcttactccttctacaaaccctttgaggcaggcctcagagtttccatttactaaagaaaaaagcagtgctcagagtagttcagtaaactgacccacgttatgaattggaaggacaccaagatgtgaattaaagtgggccatcttgttgaaaacattttgctatcttctggctttccctttgaaagagttcagaacatacaacccaaaaatgtgcccctctggcacattgactattttgagtcaaaggcacgtaaaaaaagggcaggtgcaagaagaacactcttgcagtcctttttaaaagcaggagataaaatttccagttgaaatatatcctccctgtactagaagaaaagtgtcattcttatcatcaaggatgggaagttgaggtcactggaaatctgtccaaacacaccttgttaaactaactcttgtctttcttatcacttcacccaattaactaccctagcccaagcccctttaccttgtcacatcttcataatctactactctttgtccaatttagtatatgtgtttaactttaactgcatctttcagtcatcattttcttatgaagcctccaatgccacatacaacttgaattaaatacatttgtattgtattttttttcttgttgatctgtcttgtgtcaatttaattatcagccacaactgaaaaactctaggaaggtagaggtaaaatcttgccttccctacaccttgagggctcaatgcagaggttgtcaaacattttttttttctctccagacatgagatacatgatgctcacatgttcagtttgctcccatggaattcctggggctcaagctgtaaactcacttttatcctacttaaaaggtacagtggaacatgactggcatggcacaaatatggggatgaatctgaatcctctctgatttgtatttttaagtagactgttcctgaactctgagtcctttctaatcgtaacaaatatatagtaagcttgcagttgattttcatacggagagtaacgcctattgatagtgttggtgaatgcctgtaaagagactacatcactttcagagtctgtgttacactgttgcttcatgatctgtatcactgaatgattaagtcatttaagaacattcttcagatgttattggcacctcaagaaccgtcagaatcaaagcattgactcataaatttaatttaaaaagagcagctactatgttccagaaactgttctactttctcattataaacagtagaattcactattaatagtaaaggcttccacaggagcagaaaaaagcatatatcattttacagacatacagttgagcttaacaaagtcaatttgtactctctctgaaacaaaatcacataaattttgacgtttttaatagagcatcatgcaaagggaataaacaaacataggctatgcaatagtgttaatagaaataaaaggcagtacacatttagccaaaagatataaacaaaaaggacttagatcttttattattattgacctcaatagtaatgttagttattatggtccatagcagctgcagtttttagattctagcatagtgccagtaacttaaaaaaaaattctgtcattaattccaacagcacatttcttttttcactttttattttatagatttagggggtacaagtgcactgttgttacatgaatatactgtgtaatggtgaagactaggcttttagtgtaaccgtcactctaacagtgtacatatactgtacccttcaggtagtttctcaccccttgcctccttccacctttctgagtcttcaatgaattattctactctctatgtccatgtgtactcattttttagctaccactaaaatgagaacatgcagtatttgtctttctgtgactgagttatttcacttaaaataatggtctctagttccatctatattgctgcaaaacacatgatttcattcttttttgtggctgagtagtattccacctaccatcttttctttatccagttctccactgatggacacttaggttgactccatattgttactattgtgaatttgtattgtattttttttcttgttatagatagcactgtgataaatgcaggaatagaggtttttaaaaaaataataatttcttttcctttgaggagatactgagcagtgagattgttggatggaatggtagttctatctttagttctttgagaaatctccgtactgttttctgtagaggttgtactaatttacattcccaccaatagtccacaacacatttctgtatggtgggcattatcttccttttacaattgaaaaatacagaccagaaagagtaaaacagcttggttgaatttacacagaaatcccttggcagagaaagttgccatacccagaccactttctatagctagaaagcctaatttagagtaaaatgtacatttatatttgtcaattcatttttttcaatcaaattctctgaacactgctaagcaaaatatggcataagcagtactgtgctggtaaatgtttaaagactggctgtcaaaaaaggggtacatattatataagcttcttttaaattgtactgacataaagaacatgtagcacacaatttacatataataataaataatatatgtaatactctttattatacattctaaatagttttttgattttcacagaatgcttttgttgaattttacctaaaatgtgtatcaatagccagtctgtggttttaactgtcccacaatatgggtcatgaatgttaattgatgttttcagattttaagcaactgatgtgacatcaggtaccatggagctggaaagagagacttgtgtagtattttaccatacacatacgacagacacacataatctcaagagcataggtaatagtcaaatgtgcaaagtaattagaaagggatgagttctgactattggttatctgtgttttgatataatttatttcattgtaggtttatataatttaatttcttaataataactttaacaattgcctcacaagattcctgaaaacttagcagttggttctcgtgagctgatgtaactgctgatagggaacagttaccagttaatcaaatatccccatttccagtgtcccctactccaactcatagctctgaatatgtaagtagagggcatcccattatcaaacaaaatagatgttgagaaagatgatgttgcgtagagttgtttctttaatattcattgttatttttgtggtttattcacaggcatttccctgcatctcaacaggcatttatggtaagtgatacagcttttgatgatgtttgtatttctttattttgctgttaaatgcagagattcagtgaaaaaataagaggttctctgatgaatatattttgctgtgatttagagactaaaaatgctcgtcaaatcccattaaagaatgtcatgaggctattcagattcttttgggttcttgaatttggttatatcgggtatcacatgaaattatttgatacattgtggcttgatgtcttttgttaaacaaaaaatttggttccagtaggattgacttctaatattgctttgtttaatgaaatcaaatttcttctcagtagaaagcataatgtacatagagtttagcagtatcattattttgttgctatttacaaaataatagaaaaattaaaatgcatacatatgcatatatctgtgttttcaaattttaaaaaagtccaaagaagtgacttttactaaatatgaagaattttaataaactgcaaatttttttttctgcatagtgatggattgtgttaagtagtgaatgcctcacttacagatggaagcaaaatgtttcttaatcacttgctttcactagcctaaagctctctaaatattcttccacctacctacaagaacttttttatactttttttcagaccattaataagtctgttttataatgttaaagattttctgatctaagtgaaatagattacattctttctgaacttaaacttctcacatggaagctgtcagctgaagcacaaaatatgtaaaaatctaacatatatgtatatattttaaattcattattacaatgaaggactacctagattgatgtcaaaggtaggagctttactttttttcttcatctggtatttcttttgaaggtcttgagcaaaataaaatgagaaatgtaggcctgaaccaaattaagtgggaaaggattttgtcacactatttaaaaatttaaggtttcctccttcaatttaagccttcttcctctccagattcccctacagcctgtctttgtggaaacaggatgagcactgggctggagggggctaaactagaccatctgcacaattatccccatcatggccattctttctgcctcacaaatgcccaataacaaaccttaaatatttgcttaaaggaagtattatgtacaaagttatgcctggcaaataccctaactctttatttcgccttatgtagagtcaaaccaaacttcattgcagaaatggtttttattatgaaaatgttctttcattgcaatcttgattttccttgccaaaaaaacaaacaaaaacctaatgcctacaccaatactgtatacatcattttctatgtttattaccttgtcagagagttgaagtatgttttacttctgagaatcttatggtaatgtgttaagagcttcaaaaagggaattgatgtaatatatatggtatactataagtaggggggtggtgggaaaggaaaacagaaaagcaaaggaaaatagggaaggaccataaaattagaggctccaatatgatcatgtcaatagatgcagaaaaagcaattgataaaatccagcatcctttatgataaaaaccctcaacaaaatgggcatagaagggacttacattaaagtaataaaagccatatatgacaaaccaacaaccaacatcatactgaatggggaaaagttaaaagcattccccatgagaactggaacaagacaaggatgcccattttcaccacttgttttcaacatagcactggaaattttagccagagcaatcagacgagagaaagaaataaaaggcatccaagtcaaaaaagcagaagttagactgttgctgttctctataatatgatcatttacctagaaaaccctaaaactcacacaaaaagctcctcaatctgataaacgaattcaggaatgtctcaggataccaaatccatgtacagaaatcagtagcactgctataaaccaacaacaaccaagttgagaatcaaatcaggaactcaatccctttcacaagagctgcaaaaaaaaaaaaaaaaaaaagataaaatatttaggattatacttaaccaaggaggtgaaacatctctacaagacaaactatgaaacactgctgaaagtactcagagatgacacaaacaaatggaaatatatcccatgctcatggatgggtagaatcagtattgtgaaaatgaccatacttcctacagattcccatcaaaataccatcatcattcttcacagaactaggaaaaaaaagctgaaaattcatatggaaccaaaaaaacagcctgcatagccaaagtaatattaagcaaaaaaaaaaatctggaggcatgacattactcaacttcaaattatactacaggtctataactaacaaaacagcatggtactcctataaagcaggcacatagaccaacagaacagaataaagaatccagatataaagccaaatacttacagcaaactgatcttcaacaaagcatacaaaaacataaattggggaaaggatatcctattcaataaatggtgctgggaaacctggcaagccacaagtagaatgaaactagatcctcatttctcacctcacacaaaaatcaactcaagatggagcaaagacttaaatctaagacctgaaaccataaaaattctggaagaaaactcttctagacactggcttaggcaaagaattcatgactaagacctcaaaagcagatgcaacaaaaacaaaaataaataattgggacctaaattaactaaaaagcttctgcacagcaaaataaataatcagcaagcagacaatccacagagtgggagaaaatatttgcaaactatgcatctgaccaagaactaatacccagaatctataaggaactcaaacatatcagcaagaaaaaaaaaatcccataaaaaatgggcaaaggacatagacaattctcaaaagaagatatgcaagcagccaacaaacatgtgaaaaaatgctcaacctcactaattatcagggaaatgcaagttaaaaccacgatgagataccaccttactcctgcaagaatggccataattaaaaagtcaaaaaacaatagatgttgtggtggatgtggtggaaagggaacacatttacactgctggcgggaatgtaaattagtacaaccattatggaaaatggtatggagattccttaaagagctcaaaatagaactaccattccatccagcaatccactactgagtatttatccagaggaaaagaagtcgttatatgagaaagacacttgcacatgcaagtttatagcagcacaattcacaattgcaaagatatggaaccaacctaaatgcccatcaaccaatgagtagataaagaaaatgtggtatgtatataccccatggaatactactcagccatgaaaaggaatgaaataatgtcttttgcagcaatgtggatggagctggaggccattattctaagtgaagtaactttagaaatgggaagtcaagtattgtatgttctcactttgatgttagaactaagctatgaggatgcaaaggcataagaatgatatcatggactttggggacttgagggtgacgggtgggaggggtttgagggatgtaaaactgtctgttggatgcagtgtacactgcttgggtgacaggtacgccaatatctcagaaattaccaccaaagaatttttgcatgtaaccaaaaaccacatgtacccccaaaaatgttgaaataaaaatacaatttaaaaaagtttaaaaaggcattttacttaatcactataatacaaaaaagcagaagaaaacacattttccaatacagtagacataacttaaaaatattcaagtatctcatgagatctgtggtatatttatgtatctataattcattaacaattcatctttcacttaataataatatttatttgttccacacacaatgtaataatttaaacacacacacaaaagaattgttagatcatattatatggacatgtttaactgtattgtgaaataccaaactgttttctaaagtgattgaatcaatttatactcctacccactctacccactccatttgaagatcaccatgttccctgtcctccccagtgtttggtattgccagtctctaaaattgttgccaatttactgagtgtgaaattttatcccattgtggtttaaatttgcattttcttgattattaataaagtaaactttttaaatatcaaaaacaaaagagtctccagagtggacagtaagaactaactaaaatctagagtggatcatggtccattttaatctgtgaagaatagggatttcaccctagagagagtaatgtggttcaaaatataataactgattcagtacaccattgtggcgaatgggagggaaatagtgaagattgtcaggcatggcattaatagtgtgagtcacattagctggcttggagggctgtcaccaggcaagtttagtcattttcacaatgctaggtcaaagaaaatacttcttcagtcctggctacttgtctctttctcctctgttttttggtaaatttacaagtgagactgatatacacaaaggtcgcatgccatattgcttttggttagtccccctggggttgaaacctaactttccttttagcttcataaccttctgtttcagtaactttagattgctatgtctctgtggtttatagaccattcagcattatgcaacttgaaaattacttcatatgtcctgcattagtccgttttcatgctgccgataaagaaatacctgagactccgtaattcacaaaagaaagaggtaattggactcacagttccacatggctggggaggcctcacaatcatggtggaaggcaaggaagagcaagtcacgtcttacatggatggcagcagacagaaagagagcttgtgcagagaaactcctgttttcaaaaccatcacatctcatgagacccattaactatcacaacaacagcaaagggaagacccacccacatgattcactcatctcccacttagtccttcccacaatatgtgggaattatgggagctacaggaggagatttgggtggggacacagagccaaaccataccatttatggtttatagaccattcagcattatgcaacttgaaaattatttcatatgtccctggtgaagttacagctttctcagtccttgcttctttcccaggatctgtgtattacagactagttttcttgctcttatttgaagccctcttcctccttcattaaccagataagttttctttcatcttttttttattagggtttgacgtaatattctatttaaagaaagtggtccatagctgaaaagaaaaattttacaaagcaaacacaactcccaacatttttgtaagtcatactagaatggaggtagagaaggtttttagaatcatttcctggtggcactctttttctttcttgttccatattccaaatctcactagaattgtttttctaaaataccacttggtgcgtgcttcccatctgcccaggagcctttgctcatattctattgcttgcagattgatgttcactcttcctagcctgaacaatgggcactttctatatctccataaactagtgctttcaaaatgtgtgagagggagggaaattggtgtgctaaggatgtaaattggtgtgctaagaaatttatatatgccttttcctttgcatctttaaaagggggatttaatttatggcagttcttaaagttatttgatgatagaaactagtatatcctcaacatttctctggactatgttttcttcagaatatagtttgagaaatttcttggtacccattcatcatggttatatcttctgtgacccacatgtacatgatctgatgaatataagaacttgccattgcacagtgaggtccaatcttgggtcccttcctgaaacttactccttaacacctcttccccaatgcacacacaccaaattcgcacataccatcaccaccagtgttgtctatctcatgccccaaacagaaacatgccaagcacatttaagcagactgaaacatttttaaaaagttttattttaggtttgggggtacatgtgaaggtttgtcacataggtgaacttgtgacacaagggtttgctatacagattagttcatcacccaggtattgagcccagtgcccattacctttttctgctcccctccttcctctcaccctccaccctcgagtagaccccagaatctgtagttcccttctttgtgttcatgagttctcattatttagctttcacttataagtgagaacatacactatttggttttcttttcctctgttagtttactaaggataatagcttccagctgcatccgtattcctgcaaaagacataatctcctttttttttatggctgcatggtattccatggtgtatatgtaccacatttcctttatccactctgtcactgatgggcatttaggttgatttcatgtctttgctattgtgaatagtgctgcaatgaacagtcacatgcatgtgtctgtatagtggaacgttttatattccaacaaaaattagccatggtagtgggcatctataatcccagctactcaggaggctgaagcaggaggattgctggaacccgggaggtggaagttgcagtgagccaagatcacaccattgcactccagcctgggcaagaagaacaaaactccgtaaaaaaaaaaaagaatgatttatattcctctgggtatataactagtaatagaattggtaggtcaagtgatagttctgctttgagctctttgaggagtcgccatactactttccacaatggttgaactaattcacactccgaccaacagtgtgtaagtgttcccttttctctgcaaccttgccagcatcagttattttttgactttttaagaatagccattctgactggtgtgagatggtatctcaccgtggttttgatttgcatttgtctaatgataagtgcattgagctttttttcattggcttgttggccacatgtatgtcttcttttgagaagtgtctgttcatgtcctttgcccactttataatggggttgtttgtttatctcatgtaaatttgtttaacaggctgaaacttgatctgcaggaagtcttccttaggtatgccaacccttggtggtcattatactttctgaaatttttttagcatttgtgtcaggacaattatcaactgcttcctcatgttgctccatagattgctgtttatatattctgtgctcacagccagtttggaatttaaagagcaggaattcacttctgcatatcctttgcacacccagtgcctagcaaagcactgtgtctctaggagaagctcagcaaatatttggttcatgacagcagtgattgtaatccaaattgttgcctaactgaagatatagaaatcagaattcttgattggcaaaataacaggtaaagaaagctacccagttggtattttcttaatgggcaaacatttctattctaggaaaaacaaatgtgtttttaaaaggcattctcaaactggaagtttgtatttgtaggtatggcagtgtccaccctgtcaaggtaaaatggaaactcaagaacttattcagttagagagccaaactaaatacagcattttacttcagttaaaatagaacccctttgtggtttattacagcccatggaacaatggtcactcaggaacatacaggtcagctggccatccaggaggccctgttctgacttctccgaatgtaccccagacccagcccatctctccagtagctgccatttctcacacacctgtttgctttggagttaccttcacttttagatttatgccccaaaagtccactgtaatcctagttctgctataatgaaattttgaggatggcagagctacctttcaaatggattttgttatttaatcactgagattattttataacaggataatttcaagagtgagcatacccatttcctggaaactcggacctcagcatcacactcacagtgtgtctggaggacctggccaggcgccagtactttgggggtgctcaggaccctggcagctctcctagctttctctccctctgcagccctatagccacaaaccatcaattgcagtgaaaccaccttagcctttttgtaaggcacagcctgaggaatatcctccatgtgattaacctgatttaaggaggagacaggatgagagcagacactgccttctttgaagttcccctggaagaggccagacttttccactctgacattcagtgagcactgttgctactccaacgtgacgtttccaggatggttccacagggcaccagaccacctgcttacactcaggatgaaaagcctcgtttggtcaaataccaaagaaagccctgtgctacttttggaaaaatagatccagatgaggctttcagggcttgaaatccctagattcctgttaaaattttgcactggcctctaaagcagtctctaaacagatctgaacctccctgatggacatttcagatctcaggcgtgctttctgccctttgagccctattttgacactctaatgctaataaatttaacaaaagaggctagacataatacatggcaatggaatttttactgagaagtgaatggcaaaaatgattttagtcaattttatgagagtcaatatagttaacagaaatcgactcctggctgaaaagtgtattccgtgagtacttaaaaatttggaaaatattttccctggaaaaaaagaaaaactttgaagtttgctttccaggtatgacgtggcatatgtagagaggaaggaatttcagacattgagttattggctgtaaatgtgaggaaaaattgaagtgcagcatagcttagctgaagcagctctcgtgtttatccaatatagttttgttatcaacgtggagtgcctgtttctatcagatcacctggtctctttctgctatccaccacatgctggcaggctgcaactttctaattgaatccctcatttgcattcaagtttgctctgcttctaactggtaaaaaggagaccagcgcaatgttatgttaaccttgtatctacttggcaaatatttttatcagtacatctgtctagagtcacagacatgacttggaaaaaaattagggcattctccaacggcaatgccaagggcatgcccttcatcagctttaaatgctgacagatttgagaaggtgtgacaatcattgctgtgcatatttacagaggaaggaagagttctcttatgtaatgcattgggaaccagagcaaaactgacaaaattatgcaccccttccttttatcaccctaatggctctcctccttcctttggcttttttctcttccctttgatatttccatttgctttaaaaacttactctcaggtggtctaatgatgactcttttcactgtcgtaaaatctctgctctggcaacctaagttttttatcttgtcaaattattcccactgtaagaaatgttatcattcttggcaaagcaaagtaacattagaatcagtgtaacttacttcccttgggaaaatgcagtgctggggccaagcctatctctatcatagctcgtttgaatatcactttatgagctaacacttttgagacagtggagagacaacttgacagacagcaaaattctggctattcaattgtttctaaccctgagtgcttatcatttggacagacaagtttagctaacattctcattcacagaaacattgatacatacatcccagaaaatatggtacagactcctctcgtgctctccataccctacccacgtctttaatattaaaatgacatcaaactaagaacccaaaggactaacttcactctggaaagtagtctcaagtgaccaactacaaaatatgctagttcagtgtacataaaaatggcagtgaaacccatgggcaggattcctctaggggacctgacaaaagagatgaaaatcctggaaacttagtttttctggaatgcagaggcagtgagaaaccagtgtcagtcttcctgatgttctgttccagatgaacaattttgggacttaattaaaagattaagtgtttcactatgcaatatatgcatggaagaaacttgtatgtgggccctctaattatataaaaataaataattaaaaaagaaaacaaaaattaaaaataattaagtgattcaaaaagtaataaagatcacaactgtctgactgtttctggggtttggatgtgcactcccttgtagttgtgtcaaggtaaaagtgattgaagcctggaaggcatcactgaattcccacccaccccttcctcagatgtatcacttattgttatgctataatttttaaaaaatgattttctgaatagacgaaacattgaaacagtaagccttttaaggaaatagaaaaactatgctaggaaattacagagccaatccattgagcagtaactctgggaatatctttcaggtaccttgaaaaataggagcactattaagaagctccttctaaagaactgttttggagtgttgaagaattgtccacacttggactttgatcactgaaataatttctacgtccttgcttgtttttctcatctagtcttgaatgacattccttttccttgctccttgtacatacttgtgtctaaagggtaaacgtaaataaacatagccctcttcaaaaagaacttcaaaaataatttgacaggtcttagagaagtcaaatgtgtttagctccttaggacaatgacttttatgtcaaatcctttttggtcaatgatactcttttaaaaatgtattgtgaaatgtatgtgaacaagaccatattagttagggtaaagttaaactgttctaacaaaaagactccgaaatagactggcttattgaatatcatgtttatttaccactctgctaacaggaagcattctgcttgtggaggatttgttccactctgtcattcaaggagccaggaatctaccatggtgtcaatgccttcccgaaggtattggtctcatttacttacccgccctggtgctggcaaaagatgtgtatatggcaagcacaccctctgtctaatggtccctctactcaaagtagcattcatcacttccactcaccttccatttaagagaaattggtcttgtgaccaatgtctgcaaaggaggttggaaaatttagtctagcttggggtctacacatctgactacaattctattacatggaaagaagggaatatcacattttgatggacttccagatatttaccacccaaagagaaaagaaaaacaaattaaatcaacaggttgctcgtagataaattagtttaggggcagtgtcagccacccgtaatgggtacttgctttgcaagaatatttggtaattttgatagcatatactttattaaaatgtctttataatgctgagtgcttacaaatttgaaagtatgaaatttttaaggcataaggacagtgatctatctttagttgtcagacactatatttagatatttagacctcacctcaattgtttacattttttggtaccaaaactccttgcaaaattttcagatacatcagtggaaactaaaatcaatacattgagaatgaatacataattgcattatttattacattctaattctggcccatttccatagaaatccttggaggcatcaatcgcaatttgtttctgcaacactctaaggctgtggggccacagtcatccataaacataccaggagtcctgagcagatatggatttacatcctgtgtacctaggaactctggggaaatgtgagtttagggcagagtctgatcatagttgagtggaaatattacagagaaagagagagaaaatgatcatatgaatatgaatctaaatctcctgggtagtcaaaggaaatctccttagaatctttagagctgaagataatagttcatacctgtttcccatttcagccgtgaacaacagggagagtttcctacaagtgactgcaaattgaactgaaattaacaaaatcgacatgaaattgcctcactttgtactttattgacctgacttcatttctaaatgttttaaatgaatccagttttaccaaaatgttcctagatcttcttaagcaattgcgtttttggtaaaatgcactttccctttacttgagatttccattctggtaattgtgacttagcttatgaaactgggctctaagttctgtcactgttatattccagcacctagctcagagcaggatgcagagtaaatcttaataaatatctgtttcatggctaaaaaatacataagcagctctccaatgtaaggaggctactggcctgttctgtccactctagagatcatactctggattcaataattactgagtctatgacaccctggtttctatttttttacttactctaaggaatgatttcattcagattttaagacgataacaggagagtcagttaataaaaatagagcctaatcttttagatgtggttaatttttaaagcggttttattaaactgtaattcacagagttgcacaacaaccatcataatctatgttcatcatgcccaaaagaaatcccacattagctgtcactccgtcccctctctctcaaccttgggcaactgctaatctacacttgatctctatagatttgcctgttttgggtatttcatgtaaatggaatcataaactatgtgatcttttgtgactactttccttcatgtagcaaaatatattcaaagttcgtccatgtcatagcatctgtaattaatctctttttattagtgttcctttgtatcaatgttccacattttgtctgttcattcaggatatgtgcactgtttctactttttggctgttgtgaacgatgtttagatgcagctcatttaagcataattacatcgctaaatatacgcactataaatgtaaaacagtggtgttctgtagttaatttttagtcttccttgctgtttccattctttggtcctctagtttctctcaggcctctccaaagctacttttgcttgatggctctggtgtcctgctggcctatgcagtgatgtaggtttcttgaaacatggtctgtatctctgtgtgtagtcagtctgtacacatcgcctcagagttctcttagagtaccaaagaacatcgtggaaggagagcatgtatcaaagtggctttgggcatggatttcaggctccgatagatctaggttcaaattctgagtctcttattagctgtgtggcctcatgcaaattgcttaatcttcctaggccttaataacctcaattctaaaatgaggttaataatggtataattattgaggttttttagtatgaggttaataatgtaaaatgaggttaataatgaggttcatataggtaataatgcctatatcatggggttgttgcaaagattaattggataatgcattaaaatgcttatcatagtgtcatatataaacacaaacatttaacaattatttttaatagtaacattattcttataactactgctgtcattattgccctgccactagattctgagttcttttagggcagggactttgattattttgttcactgctatcgcttagattctagaactctgtctatactattgaacaaatacttcactatttgaagaaggctttacttttgttctggatgataccagtcagtggtcccttatcatgagagccaccttgctttctgtttgcttgaatttgctgcttttatgaaatccaggtgtctcatctcagccacctctgagtcctgtggtatagcctgtgagttcagctgtctggaaatgaagtctgtttgtaacattatcataccacactttatacataaccactgtagccaattgtttaaaaaatagtcaacttgcttaagcacttccaagctccctaaaatctaactaagtcctaagaataaaaaggaaacattttgttttgactgtaaataaatacaagctttccataagagagagagagagagtaattatagttatttgtggtctgaaatgtgaagttatgtgttgtaagacagcagattcttacggacaaaaccaaatcatgtttctgtacatagattttaaatgcttccttccaacccaggggacccaggggagtagataacagttgccacttagcttacagagggaaaaagtccaatgcttgcgtttcgttggcccaaaatacccggaaagcttgcacagtttttcatttctaagatcataggctcttagaactgaaaggcattttggaaatcatacttgtcctagatccttattttcctggctgggaaaaatgagacccagagttgctgagtgacttggctagcaacatccaactagttcatatcagaaccaagaccaatgtgttgtccagccaatagggtgaaatagcaaggggagaggtctgggaatcagacaatcatgaaccccaggatggtccacttgctgacctcttctttgaactgtagttccaagcttcctcatatgttagatgggaacagcattaatatacaccttctgctattagaagaaaagaaaggatttgaattgaggcttttccagaactgagtagagtgccaaagatttgtgtcaataaatgtcatgatggcaatactttctctaggtccccattctctcctctgtgtcttcttctacccaaactgctgcttctagccaaatcctgtttatatggactaccccaccttcagccattgggttcatcatcagtgacttctgaagactgactgaatatagaaaatacctgcacacccatccttctatgcatcatatcattgtttcttcctctttatcatgaaagatcctttatagttaaaggtgatgcatctgtatcctcagggtaccaaggcataggcagcctgtgcaagggaggatttttgttcttgttgaaataaaacattgtattctaaagcagaggcgttttgcaacctcattcttaaaacaaaatgcttaacattactcactagttaagtaattttatggccctcccccaataaatcttgtacatgaaccctcaggaaggtgcacatcccgtggtttatggtgcctctggcacactgccaacaccccagtttgaaaagccaggcattcaaccaaacttgcgaacgccagcccttgcatataattacaggaacctgtgaaagtgatcaccggcagctcaggggctccaagcttccgcaagttctgaatcccttagcaagccggaaagatctgctggcgctgccgtagggaaaggttagcatcctaaattatggcctttcaattttttttcaactttgcaaatattttatcttctcatccttagtgaaaaagatagaagtgcacagttgctgttttcccatgttgtttatagaaggaaaggaggtctcaacagctttttccatccttcataaaacaatgaaaatgtgcctcgtggccaggataaaacagtgatatgcatcgagtgatccaggaaatgtaaaaatacttgacttgaaagactttttaaagatacctctgcacatgttaaaggcagtggcagtactgggacctaagagtgtgcgtgtgtgtgtgtgtgtgtgtgtgtgtgtgtgtgtgtctgtgtgttgtataggaagtatcccagtgcagttcttctccctacaggcctcactcccaactacctgtccagcctaggaagaggtaaaaaataggaattgtggtgagcatgggaaggtggtgaaggagacaagcaacaagagacagaaatgccaagaagttaaagcaagctggctgcaagctatggcagggcaacaattcctgggaaggcagagcctggctagcagaggagctggggcctgcagattggtcggtgcctttgctttcctgctgtttccacttcgtgttctttgcctcctcttcacactaccaactccttccacttcacacgttctatctcaagtgaggcagtgcccatctcaaaggggccacagtgttagagctgctaaaagcaactaggtaagtgggaagatggggttcccttattttcctaccaggctctccagccccagggctgccatggccacttctccagctcccatctcacttcctaccctaggcctgccataatctccacccagctttctttccaggagtgaagtccagtgtccaatcgagttgccatgctggacaaactgaccttgaccttttctatcccagtgtattatcttgtctctagcagtagccatccttaggaaaccccaggaaatgctatgtttgcttaggacactggaaacatggggtaaaatcaatgaagctgttttgtgttctgccgcagggtgaagcaggaaagaaatctaatgggggagtgactcatggtaagagatagtggccctgtctctcaggctattagaaggtaccaaagaggtgaatacagactggttcaggcctgtgtaaagcccaagtatttatccttgtgagaggccatgacatttttcctccagttccccaccctagaacctacactcttctaatccccatcccatctctgcctcccctttccttggaatacaatgttacaggctatggaattcaccattagtaatgtcaagttgtggaacttccattccttctgcttggaaggtagaaggcaggagagttccctaggagtggagaggagatgctagaagcccaatccaaaattccaagaacatttttcttaggatgaagactaccagcatggctttcaagccctagagtggtcttaccttgtgcctgactctctttcagtctgtcctagcaggcattttctctgctgtttgcatcctcagcctgcagaactcttactgcccatcttcagctggttaatggtggttaacaagcaaggcccctggagggatgcttgccctggcgtccctgagcagatcaaacctccttattaccagctctcatggtgttacatggctgtccttcatagcccttaatacaatcaaagctttatatttattggggtgattattttatcaatgtcagtgtctggttttcctcaccgttatgtcccctgctcccagcacagtgtttgacaaatggtagagagtcagtaaaatcttgttaaataaatgcatacatgttcctgtaaaaaaagaagcactatggtctatcttcattataaattaagtcacttttgggcttgtcctgacaacaaaattataatgcacagtattatcttgtgagaatatgaattataagtttcaaataatcaagtgggaacaaacagttttgaatatgaacaacatgtaagttagagttcttatatttaattctagggatatgtttatcttcttttcttataggacatacaaccaaataagtgttttgtcttactataaagatccaggattttgatgtttgcattgattatccttacagtcatcctaggctaacagttctgcaaatggtcatcttttctcttagggaccatccctaagaccttgaataactcagagcagataatcaaactatctaatgatcactgagatcatttatgcatcaggatttatcaataaaaaataaaccctttgaggtactaattgattttttattcccatccccaaaatggcagctcattagtgtctagtcaccagaaaactggggaccatgtggcatccctgtcccctcaccgtctaatatggcacctgttccatggaacatactgaataaatactcatggcattgaaatgaatcacacctatccctcactgagccttggctaataattgatcagagagttcatgatcaccacccatccttgagagggctcctattaaaaacagcagcaacaacaacatgtgactagagcatctgaacgcttatgtagcactgacgttaacaaggataacaggagcttgaggggcattttttaaaaggagtgcttttaatcattaaagtgagatacgcacatgctaaaaaacagtaaagcaatataaaaagtcatcaaatggtaaaaatctcttcccaattaaaaatgccagtatccctcttaagaggcagccactgttgagtttcttatgcattttccaaaaaaataatattcacttcatatataagcctataaatataaccaaattttcagtctttttattttcatggtttccaacttagaaaggccttctatttcaagattatttttaaaaattaacccaggtttcttctagtgatctagtaacattttaaacatgcacagaggctggacatggtgtctcatgcccgtaatcccagcactttgggaggccaaggtgggcggatcacctgagatcaggagtttgagaccagcctgaccaacgtagtgaaaacccgtctctactaaaaatacaaaaattagctgggcatggtggcatatgcctatagtctcagctactcaggaggctgaggcaggagaattgcttgaacctgggaggcagaggtttcagtgagagcaaagattgcgccactgcactccaacctgggtgacagagtgagactccgtctcaaaaaataaataaacatataaaaataaaataaacacacacaacagatattaagccattgatttatgtatatatgcatatatacacacaccatacaggtatacatagatatcacacatatatacctgtatgtctatacaagcatacatatacattatatacactgtatattatatatagtatgtttacttgtctgtgtgtgtacacatacatatagtgaagtatatacctaaactactaaaggagaaattttatatatattacaaaaagttataaatgcatgctcttacctatgtatattggtttgaagaaaaatataaaatacttaaaaaagattttaggagtatacataactttaaagaaacatataagtactgcccatttctttcccaaatgatacctatttttataaatttctttagactcaataattataaggtaattttttatgattaccttttatttatagagatatatattatagttttaaatgcttatatgtacacacgtattatatacaataaaaaatgtattacctattttgtgtgtgtatttttgtgtatgaatgtgagagaatgtggtgtgtgtgtttctatatgtcagttttaatatagtctccaggcagattttaggactttatgactttctttttaaaccttctgtctatggaataattgtgttcattgcttcatctatttcttgcaaaatagtgacaatgagctttctcccactgactaaaaccagacctgttccacccattcccaccccacaaatgagcaagtcatgtaacatgagaataaattaatagtgaagccctttgacagttgtacctcaggtgcttctgatgtgcaatgacatctctcagaattaaacctaccattgtcagtttgtcaacgattttctacaagtacaaaatggaattgcgtccatctcactcagatttggaagcaagtctgattatgggacatactgggcttgacaagctaaagacagatacagacattttctcatttatgaatctattcctttgggacattgttaaaattttaaaaaggtcgtatcttctaggaggggataagtaacataagttattttgcaatagctatcaatgtgaaattttgtattgtcttttggaagtcagaggaagaaagatgggctgcctcggtgcattttccatttgcccgtgattagcatgttctgaacatctcagtgggagtcagaggtatgcttctctttgggttttttcagtgtgaaggatggaaggaactctttcacacctttcatttgcactgttaagacttacatcagaagtacaaagcattttaaactgacagaataaaaagcaaacttcagagcaactttcctgcctatggtgctttccaaggatctaagacacatgagcaaatctcctgaagggtggtaaataaaaaaaaaaaaaaaaaaaaaaaaaagagtcacctttggccctttcttcatctttgaaatacactcgagaatgggctctctccctctgaggctaaatccagtgtgccctggagctgtcagacctgcagaaaggccctttttgccaagcagtctgagagaagactagcggtaattggcaatccagttctccatttccattgtacagccatccctgacaaattaatcacaatcaaatgttggctgcagcaaggggcaccctacacagcaggaaagaaaaatgaggcctcacgctgatctgacagccgaatctttcaactcaccccattagactgaacaaggggacgctgtggtttgcctgtcactaccactacccataaacaaactgctcgctctgcatctcaggacttggtggatccagtaaggccttccttggggcccaccaggtatctgaacaatcagtgcttcagagaaaggggaagggcctcatcctggtgagaaagaggcgctagatagtggcatagtggcataggagactggtgaggacaccgtggcccaacagaatcctgaagtgatgaatctcaggtttgacagtgggttgaggtctgctgcaggctgtaacggagtgtctgtctgtgcgcttactgctcacctgttgtctatcagccatcagtcaggtagtgagaaatccagccctttccatccactgtttagagttcacttatcgggcaagcttctttgttcaacataaaaccaagaatctgaaaataccttaaaatgttatttatatacttgcccagtctctgtagtaaagtttataagccttagtcacagaagagagtctgaggccctcactcttattttaggcataattttaacaagtgtgtcacagcctatagcaaattagaagatggcaggaagatcctgagaggtagatgctgacagtaaacagtgggataatactgaaaggtgacccaaaaaaagatagataagtttgtttccctgcctgccagtagaatataagagaaaatcatattttgaaacgcttggtcttttttaaaagacaaatgcttactctttgtaaaagctgtgtaatgaaatgtccccgtgatgttagatctgaagtggaagagtctctcttctctcccatctcctctgtaatattcaagatgtggtatataactgaatcacatcaagcaagaataataacgctgcctctgttctgatcaagtttacccttactccttataactgtgggcagtggcattcacggctctgccatctggctctcacaaaactcagggccaggggcttgtgggtaggtggtggaatgttctaattcctggagaagatattattattcagactgtataactgaatagcatcagtttctctaagtttttccatttcacctctcccagacaactgagtataaagaagtataattaaaatgttggctttcataaatgttaaagccacatttaaaacatttctcatctctaatactaactcagaaaactacttttctccctatatatttaggactagagattttgtcaataaaaataatggagaggatttgaggtccaaattaaagcaatgtatttcccagaactaaactgagtgtgtcagtggcttgtccaaagtcttgtagaagccagaccatgaacacagcatcaggacctgctgtttagtctttattcagaggcacataatttggtgttcttctgatgactggtttgtttttgtgggaataaaaagaatacagctgaagggatgtacctgaattgctgttttcccctttctctctctctctccctgagaaagatacataataactttctaaacctgctccagcagtctaaagattccagtgctcattggatcatggatttctcattttaacctttctctttctccctccctccccctccaacctcctattcagatgtgatcttaccagaaaatgcaattaatttaatcattcctaacattccattattttgatttgtttttaaaattatgtttacatcatgatccagttcaggttaaaacgcttgtacactgactgaattgacgcctatctttaagttaacaacattagttactatgtcctggaaacctataattgtgcctgaaatcttatgtgttatttgtaattctcacaacaatcttgatagatcagtatcattttccttattgtacaaatgagaaatcgaagaccctgagaggtgacataagtagcttaggaaggggctgaggtgggacaaggacaccacctgacttcagaggtgtctgaaaacagtccttctctgggataaagaataccgcccagagaaacattctcctgtcctaaaaagcaccatgcatgttcaccaaagcctacccagcaagtgtctggtctgaagaattctccttttctagggtctatgccagtgcttctagttatctcatggcgagagaagcttgtagcccccagagtgggaggtctctaggcagctgtgagatttgtgctggagtgtggatattagacccaaagccatgggctttttaacattggcctgtgtctcccacgcaatccgagctttatgcaccagatcgttactctgctgtgaaaatgaatattgggtttatggagaaagctaaacggttgggaaggtgtgtccctagccaattgtcaatagaggctgtgagcttcagaggaggcaattgtaataggttttcagttgacacacagttatgaccaaagcctttgaatcatttttgtgtgctttaactattgtgtgtttgttcagctgtatctttaataagaacagagcattattagcagtttttaaatcattctttgctgtaggttataagcatcttgctgcggtattcttttcaaattattggaatctctctttccctgccttacatcctgccctaacactgccttcccctctcatgttcccctaacaaatgctatatccctctcatttgacatattcaaacacacacacacacacacacacacacacacacacacacacacacacacccttattatacaacttagtttccggactgcaacagttgtctagatgtttctgagttaggaaacttgttgaatcgatatgcaggtcttctctctgtttaggtctcatttacccatcacacatatatttatcaaatatattcttaaggtttccttctccaatttcatgagagacagcctaacattccaggccaagtttccagcagtcacgctggctctcttcataaatctgtaaaataaaaatgagctttctcctttgtgaaatctcttttttataagcttaatagagacccagacaagcctgagggatagctctgttgacctcatcaagtttcttgcagcaggatgtctctgcgaaagtgggcttttaaccatttcgcatactttgaactgtggagctgacctagctgtggagaggaattgattaattagcagtgatggtggatacttattaagcaccacgttgtgccttttgccttgtgctgtgttagatgtttggtgtatattaacccctttactgtcgaaggccatctgtgtgataaacatttactctcattgatgaggaaagctggcttatggtcacacagagaccacaagtaccagaatagtggttggaccaaggcatcccaacttcaggtttcacccacgtagccaacagcgagaattacatcctaccaatgtttagagactttcttcctgtgcatcttcagagacactgggcgtgcaggcagtagagaagtatttcacctgtcaccaatgggcccatttaacagaaaaacagcagaacactcagcattcctttttaaccagctatgtcagccatgatttagataatgagtgtgcatattggtcctacctctgtgtcatctgatttaatggagattccagttagtggcagcttatccggttactttagagactgattaatgagttgtcactgttttattggatatcggtcatcagaggcaggaatacaagtgtctctagcatctgagcaacccagaacattcaacaagtaataaatgaaaacgtcagggccctttagatgtgtgatttatgtacatacccttggggtactacacttactataaaacctacaatgcaatccttatccaaaattctgatggttttaatgtttaaatattctgcttgtgaaatatcatatggctttgagcaaataactgtcaggcctgtcgaaatctttttgtaatgggaagactgtgaaattatagttgtgaaatttgatgattttgaagaagaattaattactgaagtttttacagcagattcactttcattacccatttttctttctattgtaacgtctgtgctcggttttcctacatggattacaaccttctagatgctgactgacctctcatttcagctcatttttttaagatgggaattgattgacattttcaccagtcacgctggctctcttcataaatctgtaaaataaaaatgagctttctcctttgtgaaatctcttttttataagcttaatagagacccagacaagcctgagggatagctctgttgacctcatcaagtttcttgcagcaggatgtctccgcgaaagtgggcttttaaccatttccttttaaggaactctgtgtgttaatgataattgtggtatcttgacagtaattgctgggacaactggaaacctaaaggcaaatactggtagtcacagaactgtttgagtgcctgaaagagaaaagaatctctttgaactacctgatccaactctcccgacatcatccatgccccagcctctagaatgactgactcttcctaaaacacatcctttgcttcagttcctctgggcctttgcatacacagttccttcccctgggagaatctttctgcagatgctatctcttccacgcaagcagtttggagttctcttctgctgatcatcacacccattaatgactcttccttgtagtccctttgctgtttgctatttggatagacaagagtgactgccttcactgcattcaggcacaactatttatgattaggaatcaaaccgtgcacctgcacacaagctccctgaaggcaagtagatagtctttgcacctggtaaataaaattaagtgcttctggtgtgaactgagtcttcaggaaaggctattaattcttactgccaaattcagctagctttcatggaacctagaagcagctgccggggaagttgtgactttggcttctctttccctcattttccctagagcagtagttttcaatctcagcttccctttggaatcacctggagagcttaagaaataccaatgcctgggtcttacccctcaaaattctgaggtacagtggaatggttccttgtcgtgacctagacataggatttgtattgtctcccggcatattctaatgtacagccagggctgcgatcttctgagctggtgaacgtgaagtttggctgtcccttcatgggctttatagttttatctgcaggcctcactttttatgggcagttgacctcacctcacttcattttgtgtgatcttggccagacaggctagcacctgcaaagactgaggtatgaaaagggaatgctattcatttttctttcctttcttcttttttttttttttttttttaaaaaaaaagcatttgacttttgaatatcccttgagctggatgtatgaattaactaaaattattatggttgtcttctatttactgtatatattctgaaattctagtgctcaaattgtttcttctgttaacttttgacagtattagaagatttagaatttgataaggatttcctgccttgactattctgtatcttagatgtttctattttgaggagctaaaatggtataatgatagatctggaagttataaaaccttttgctgttcaaattgaccgtaccaaattgaccatcatctccttgttctttctgagagttagatgcataatcaggcataatctcataatgttaccaatttatttcatgtgattgggtccaagagttacagagtaactgaaatatcccaggtggaaatataaggcaactggatttgcctgcccagagaatgaggagcctcattcacttgttggaaatgcagttttatctgagctttactccagtaccgtccatgatgactgcaagccagaatataacttgactcttttcatgtcgttggcagaatttgttaccaaattcctctgcctttagttgtataaatcatcccctttagttacttccctgttttatggctaatgctctgagttatttacccatttgaggacataatgctctagttgaagcttaaataaatcttgagtccctaggagatgcctggtgtcctataatgattcaatcttttagagttgcttagactgggacttgcatcttatctcttgttctaatgatttcatctccgtgaactgtggtttcccttcttccataaaatggagataacataatataacctaacagggttgttctttctgcaccttaaatgaaaaaaaaaaaaagaaaaaagaaaaacaagtctaagtacctagggccgcatctgattcataaggaacccttccatagtacatcgtaggtattttttagttctgtttttctaaactcaatttccagttacatttttccaattatttcccccagtaaaaggaactttgggctataaatatgaattatgctatataatgcttggtttcaaactgttctgagcatttccaaagatgttttggataataaagcatgcatgtgttttcatataccattgccttgcagatcaaggatgactattccattcacacaaatcacataggaaccaactcataaaaaggaaatggactccacctttttctccataggaagttccctataatagtgagatcacagcctcatttttatggtcaaactcaggacgatatttggattccccagggaagttaactttgctttcatgaagctgctgaaatataatccaagagtcaccatcagtgataaaatcatgggcttagaattgaaaagctggagttaacactccaggtatttaacagccagttaaataccaacattcttattgacaaatttagcactgaatcagagaacagccctaagcttataaagattataagattctttgggacagataaaggcaatgaactgtttttttgtttttttgttttttttttttaaaaaaaaaaaagattgtgccatttattcagtaggtgtccactcagtactacctgagattgtcattggtgatattcatttagttctttcaaagttccatgggtatttccagagtttctgcctcatcgtatacaatggctcttctggacctggcagatttgggccaggatgcctggaggaggacagcattgggcaaatgcagagaagtaccccttcacctgcacctggcctttataattttaacccctcagtggtgcgtactgtgtgagcagtggagagtccttaggctttcagcagacgttcaaggtctgcttggcattttgaaggacaagtgaatgttgcagttgtgagcctgatgcagacatttcagggagttcctagagctgccagtgtctgtttgattgaaaggatagaagttgaaatattatcagaaggccacttggaggtctgaggaaatcagagtggaaacatttcttgagggcataatatctcaaaaatgttactaatatttaaagctgggaaatttgcctttttaaaaatttttccatgataaaaatttgtagagagagaataaaatctcttttagctgcagcctcttcttcattactatctatgcattatcgctgctattcgcccaagtctctcctatctcctgccccctccccgctctcccctttagagtactgaagtattatggatgctcatttggtgttaggatgtaattatccaaggtgaagaaatttagcagaagctgtgtgctgcctatttaacatctgaaacagcttcttaatacctgccatattaatggcagcctttttccccccactatccttgtatagaagcttccttgatctttccaggaagctaaatgctctccatcctgatcattaactaataattatccaagaaggtttcagtcttgattttttgaactgactaaagaattacggctgcctgctaagtttctaagagcgatggaagaagctgggcgaggggaatgggaagtgaagtatgaagttagtaggggtcttctgagttcaaaaggcttcttgctccttttctagacagttttcctctcccgggagcctatgggaacagtaagaactcagattatgattaggatacaaagacagtccttgtggtagatatttgtttccatttctcagcatttgtccttgttttttttttctgttttcacattattgcaccaaattttcttttgggggccacccttctccaccctcagtccaagtggttcttatgagtttctatctctagccacaaagatgtagtttgtgacccaaaactggccatagtaacagatccaggaacacgcctatgacagaaatctggtcaacaggttgattctacacttctagctacagagattgtttcagagatgggcacattgattcccctagagtgatgttttgggtaactactggaaaaagacacgactattgtttctgctgtaattgaacccaggagaacgaaggtttgtagttgttttcagccactctactcccgtttgaacccaagagtgatgtcaacatggataaaacaagaccccagaaacttttcataagaaggaggtgcaggtaacacatcccttttcagtgtttctattatttcctgtttacttcctgtttctgccaggaccaattggcaacatccttcaccctggcagtggcagttggttccagattccaccctccaacccctgtagcacctgagaaccaggcttgagtttctcctcaaaaatattagcaccagcaggcagcacggtttccacagaggtcttggtcccagctccttggggacctctttcaagttctagagcctccaatgccaactgaacagtgctccttcctcagtggtctgggtttctactgtgtggggacactcctctaggttgcaatgatcaaaacttcttccctttgatccaccagcccttagaatggtagctgcttcctgctttgactgcctgttagctcaaggctccccttatgccttttcagcccttcaaaacctatgtaaacaattccttctattacattttcttttaaaataactgtggtggtttctgtttgcctttcttgacctgactgacacagccctgaaaagaaggaactaccaattctatcaaattcccatggcctcatagacatttgtgtatgattggtgatcttttctatgaaatcaactgttttcagaatgagctctgcacaccctagagaaaacctaagtgtgatggagaagtgagggtagatgtggagaagatgaatgagtccacttttcttcattataaatagcttccctttaattatctctctctctccatatatatatatatatatatatatatatatttttttttaatagatggggtcttgctgtgttgccctggctggattgcagtgagctatgagcatgaccatagttcactgcaatcttgaactcttgggctcaagtgagtctcctgcctcagccagcagagttgctgggactataggcacatgccaccatgcctggctctgtattgtatgttttggtaagatttcatgttaaaagtattccaaggatgttctctttggatatttatttattttaaaaaagtattcatttactttacgagaatgtgttaaagtaacattgtctagctatttgattgaagttgtctctttctactcctgccagaaataaattctccctacggtatgtgtcaataaactatgtttatcttagtcttaacacgttctgtttaatattagggttatatgttacatttttcttccctacttgactgtcctctccaggaaggcaagaaactggtctgtatcattaataagcacttaacaaggacataaaagtccttagaatgagtctttacatacaagctggagtacagtggacaagttagttaactctcttttagcctattggtttattttaatacaaggataataatacctactttatacaaattgtatgatcatttgaaacttaaatgaaatattaattattcttattattagttgttctgcaaaacttctcattgtcgacattccagcacttccactcacttggtcctcagaaaatatctattgaataaaatgaactcttgcagttactttgccacatgacaagccacccagaaacttggtggcttaaaatagcaaactgaggattcttcccgaattgctatacattttgtttatgcattcaaggtgtaaatggagccttttctatgtaaaaacaaccaagctgtagacttctttgtgtaaatttactgtgtaaaaataagattttttttttctttactattaggtcaactagcctcatttacatcttttattaaacatactcacaactggtggtatttttttcctttatgaacaaagcgaaattatagattccacccaaatcatgttggaatcctgctaggtgaaaattatatgtctgtaagagctacgtggaatctagtttccagatggaattcccttcttgccaattttgggaatattctacaaagtttccccttagaaaccatttacatgaagtgaaaaatttactctaggaaaatgattggagagaatgcttgtgaaatgtgaaggcatgacttgcatatggacagtatacacattcatagatattttacccgtgccgttgagatagctagtaataatgtgtgttctcattgtgtttgctcttgtctgtagagaccaccagaaactgatttagcctgaggaatatatttcaaactgaaatttttattgtaaagtaattgcaaataacgtgtaattaaaagtgatgagaaccccttacatttgtatagcatgtttactttccaaagcacgtcatgacctcttgcttttataattctaaaaaattcttgaaagataggaaaggcaagttctattaatattatatttggacaaagaggcaaatagatattacagctgagtattcttaaatatgcaagtgatattttgttttgttgacaccttggtttgttgatttgaaagcccagtgcttttgatttagcttcaggtttggtaaaaaaggagaacagtatttactgaatgaataaacttcccctttgtaacatatttgtgtcacaactctgcaattatacaaagagactgatgtctgccttgtgggaactataattgccacttggacaagtttcatgtggttgacattaatagaccatgctgattatgactgacaaccaggggttcttaaacttatccagtaaaagggttttttcccctaatatcaaattcacaagccactattctatagtaataaaaaggcaactatgaatttggtaacgtttaaaaagttatttgcattttattaactacaactaatgtatacatttgtaaagtagtaacagatgtatgcatgaaacatgctattcatgataaaagctagtcttcatacacataggaattctcaaaactcttgaactaacccagtgttcccctgggagatcatggttaatgagttgggaagctttggcataactagagatagccattacactacattccatgtgtcaatgccaacaggaggaatgaccgcctgaagaggtgtgttgaaaaggattctgagagctagtttgggttcagagcaaagagtactgtcattaattagtgatgtttgccagaggaggaggaagtaatgggtgggaagagccaaacatttgccttacctgacttagactatgtggaccacttgactccagcaaaggataatggagatgaccactaatatctagatataacaaaggattaatctaagaagtcagttaaaatatacttttaggccaggtgtggtggctcacacctgtaatcccagcactttgggaggccaaggtgggtggatcacttgaggtcgggagttcaagaccagcctggccaacatggtgaaaccccgtctctactaaaaatgcaaaactagctgggtgtggtggtgcaggcctgtactcccagctacttgagaagctgaggcaggagaatcatgtgaacccgggaggcagaggttgcagtgagccaagattgtgccactgcactccagcctgggcaacagagcaagactccatctcaaaaaacaaacaaacaaaaaactttaaaaactactgtaaaatataaagcttattttaaaataagcacatttaaaaacaggttacatttactgaatattttattccaaacttcccctgctattaagcaccttgttcttgatcctacagcttgaggaaaacctctgtttttctctcaagacaaattgatgattgaagtatcctagtcccttctatgattttagccattcgatgaaggatctttgcacccatcagttgatactcactcatgttgcagccatctcacatagcttgtagtttttgtttgtttgtttttttccagaaacaaggtctcaccctgtcacccgagctggaatgtagtggcacaatcacgactcactgcaaccttgagctcctaagctcaagcaatccgcatgcgccaccatgcctggctaatttttaaattttttggtagagatggggttctccctgtgttgcccaggctagtcttgagctcctgggttcaaatgatcctcctgcttcagcctcccaacgtgttgggattacaggcatgagccaccatgcctgacccatctaactggctgttcttttcacgaaagacaagtcattccctgacaccatttactcagaaatgggagggagtggagatatggagaaaagtatctggtagatgactttgctctatctgtgcaatatcactgtttatagacatgcatttccctaataatttaagtcacttgccctatgaactagccaacctgcttcctcactggtttttgaaatatctttagagaaaaaatattccagtgatatgtttaatttatatgttaaccattcttggaatctcccagtcccttctaaaactcttttgccttagctttatcccactctgactgtattgaagataattaaacataatcacatcatctgacccttatgtacctgttcagatggtaattgtctttcagaactccatcttaagatagcaccttcttagccgtccctggaaattaattgctctgcctctagatcggctttgtttctatcttaattattgctctgcctgaaaagtctattttttgcttgggctttttgaggtgaggatacatgtcttagtcatccttgtatctccaatgcctcgaactgtgaatagctcctggtaaatgggcataaacactgggtaggactgacactcctctgaggcacttacctcccgtggagggagacctgatttgatttttttactctctttctaccctcagcatattccccagtaaaagctagcttgtacctttttctttacttgatatactctctccctatttttttggagattatatcactttttcaatactctatataggtagagtcataaataaagataactaaggtgaatgagatttgccacatttatatgtaggaatttctaaacaccttagaatgaagtgcctttataagaagaatgaggcctactttcatgggatatttaaagtataaatgctatttttttattttgtttttaaaaagatgtatctaccatgatacgtcataactttagaatagtttttgacttttaacatgaaaatgaaaaccagcatttagccactcaagccatgttcctgaaggggagccaggcaaggtggagagtgatgatggggtacagctctgtctgtgttaagagctttcaggtgtcctggcttcagcaaggttctggcccaggccgtgagacaaatgcttggcaatctcgggatggagtttgcagagcaggcagaattttctcctcataactttagaacagatgaatacacatttcctagattccttgaggggagcgccagctcagggctatccatagtccacaatcgggcagggtgttgggcttcaattcttctctaagcgtgtgaggcatgagaaaacggggcaaccctgcaggtcgggaggaaggggtagacatgtggctggggctccacaagagtgacggtcatttcatcaacatccaaagaccttgcatgaagatctaacctccatcactgtacccacaagtgctcccatgtgcccaccttacctttggtggcatctcttctttcgtaccctgtggaggaaggtgacttccatggccacacctcttataccatccatatttactgagcccatgcttaatgtatcagacagggtcctcagctccgtggacacagtgataagcaagtaacacatggctccagctgccatagagtttttaccctagtgaagggaaagtaaacaagtaagtgacatattttgttaaattctgtgtactgtaaaggaaatgaaacagagttatgtaatagagaaggacattatggagtgagggtggtggcagggggttactttaagtttgatcccagactttcttgatcagaaaaagtcgtggctgggcattctgcacaagtctttgcatctgtgtgcttattctttcattcatttgttcattcattcattctttcattcattccataaccataaatgctttgatctatttagctcattgcctggcattgttaacatatacagattaggcaggcttccaaattattttagccctgaggatatattaattcattcaattaaagtaattattcaagtactgtgttgacaatcccacctgcatacagccattggtatggggcaaaggctggtaaaagaacacaagatggtgtgattcatttagggtctgacaaagtgaacggtggcatttttatgaactggatcagaatctaacaaaatgcccggaattgttaagctcctcacactgtgatttggcctatgggcatgtcactggaaccagtggtctcatcattctttgctattccttccctctatttttctatatcataacaattccagtctgatttctctctaacatacttcctgtgaaaacctttaaaacaagggcttggagagatactaagaagaaaagagactgtattataattacaaagtgaattttatttatttaaactgattatgtgacagttgctactctgtaagcagccctccaaaattatttttgtcctctgaaagaaggtatttcatggctagagaagctcctaaagactctttaaggtttccctagagcctataaaaattgaaattttttgttttactcctgaggaggaacattccttagaggcccagcaagtctttatagatgcaatcataatttgcagctatttattgcaaatgcactgggtgctgaagttgggcattgcagcagatactgttgctgtcctgcccatggtcctcctgtctatgctcaccatgtccatacaacctgacatccactcaggagaaagtgtgttgctctatgaaggcattctctggctgctggaacctgctctgctgaagatcaggcaagtccagaatgccaaggaattgacatccactacatcccagctgtcctagatccacgagtgatgggattggtggataagtacccatctcctttgctcctcagacaagccaactccgaagtgtatgttctataccatttcccaaagtttcccagtgggctgtagccctagctgtccacagtggcaactgctttgtccttcaaatatatttgtttgcattatcctccaaataaattacttgtgctgaaatctctgcctgaaggtcagcttgtggaagagccaaactaagacaggtacattgcatacattatctcagttaatctttcctacctctccaaggcgaaacattgcactccccgttttacagatgagaaaactgggattcaggaggttatttttttctctctctctcattccaaatattctctgtctctcctctctctcttattccaaatctccttttctttatattttattgtgaagaaagtggccacagtatatggtctcttaggaaggtgcagccatgtggttaatgaattttgcagcagaagaataaatcaaatatttattgattcaaattggtgtaggcatggtaaaaaaatgtgaaaagtagaactttgtttattcattccacaaatgtttattttctgctaccaagtgccaggtactctgtttcttcctgagtgtatagtggcaagggagaggaggccctctgagaacagcagactgcattctaatttgtatgaagttcttactgaaatgaaagtttctgtgatgttaagattgtatgctactattcagtaaatgtctagaaagggcaatctgatttccgagcttctaccatgatgccagttaggtggctatatgtcagaaagcagagtccaggttctctctttttactttctggatagacctttactctttagatggcaaattttatgttttcctcccactagactataaatgtcttttgtagataatgaatatgtctgccgctgcattgaatttgaataaggactaatggccagtatcagaacataattaaatgcaggatccacatcaactaacaaaattagatgcaggacccctttcaaaagtacttgtgctgaggaagtactgaacatgtcaagaggatacttcctccatacttctattcaattaaaaaaaaaaagaaagagaaagaagctattgatttcagttagtgggaagaaattgggtttagccttgatggtgtcttaactacaaacgaaaccaatatcctggtgttgttcctgttccattcctcatgctctgatgatttcacagttgactagtgatttgcaccttgcttcaaattacttaggatgtattatggcattatctatgaaaacagtttgactcaagaaaaaaaacagcttgtagacaaagagagaagctcagtggctgtgcagtcacagagcagagagggcttaaaaggtttgtctggacatggaagcaccatctttgtgtcaataaggtgagtttgttccacacactttgccttttgtgtgcttcttttattttttctattatccgtcttctgctgttcttgcatcctttctcctcagatagatcttctgtatcaaaaggccatgctctaagccatcttcctttctcttcctcctccctgtcagcaatctcaatctccatgcaaagtatcactctgtcatgcaataagacattgtccccaccttgggaacatttttgctctcttagaagtattagaagatggaaaaatattcaagacccaaaggatgaacccataataatggaatttctgttcactttgcaagacctccaagaatggaaggggggatatttttgaaacacatttctatatagttcctatcattttcactgagatcactagaatatagaagatatttaggagctcatgtagtgaacactaaagccaattgctgacaaccactgattgacagctatgcattcaacactgacatacgttctgtgaggaattaagaaattaaaaagaagaaaaagtaatacatggtcctgatcctataagagattactgctggctaggaaatgtatataatatgcacaaaaacgattgatgttaaaatctgttgattggcatagtcagagatgagcaaaagaaaggaggtgggaaatggggatgatctgaaatgaaaggtagaattcatttgcaggaagaaaagaaggtagcacaggtgagggcatggaaactggaacaaacagggtacacatggaatactgggatgtggctgaactgaaagtccatgttggggagttgtgaaatacaagtgggtagtgagatcaatgtcaagctacggagggcctgggatccacaaagatgatggagcttatgggaagcagggccccagtgtgtccttaggcagggtcatgcctggcagttgggtacaaaaggggctggaagcagaggagggggagagaaatccaagtaaggagaccgactgagcaagaatccagtccacaagaaaggggccttgggcctgggcgatgccagtgggaatgtaaggagccatccaaagagcatgtccagaagacaacaggatacattcaagatggagaacgcatcagaagggattaagggggtttatgcaaatggccccagacacctcatcccaatattactcctagcagtaatgtaccaagcaccgactccataccaggccctattctaaaggttttctttttttaacttattttaccctcataatgatatgaggtctctttatttccactttctagaggcacaggtaagttaagcaatttgctctaggcctcaccaaaaaattagttgaaaacaacttagttgtcaacttgacaattctatagtttgcccatatttctcagaagtaagtctatttatctttctgtaccatttttattttattttattttatttttttgagacagagtcttgctctgtcacccagattggcgtataatggtgcaatctcagctcactgcaacctccgcctgccgggttcaagcaattctcctgcctcagtctcccaagtagctgagattacaggcatgtgccaccacacccagctaattttttgtatttttagtagagacggggtttcaccatgttagctaggatggtctcgatctcctgaccccatgatctgcctgcctatgcctcctaaagtgctgggattataggcatgagccactgcgcccagccctttctgtacaattttgaataaacttcccttcttctcagcctcttggatgtttgtttcaccttgtcactgtaaaactgaagcctggctttcccctgaggtaccatctcctcctaaccttcaacaggggttggagggggaaactactcctttgtatgtcatctccctgccacctgcggagtacggaggaagagccagggcatcccttgcacttccgggccactttcttgtcctgcagagataccaccaatcccatcttggcttgtgtccacaaccctcatgggctctccctttccaccctcactgcctccatctgtggtggtccagggctgtttctcagtggcaggacactggccaccttcttgcctattcttctctgccattgtttctggggatattacatcctgatgtagcagttcctgtattcttctgcctctatttcagccgccatcccagaccttgccttacctacagcttctgcatcactgtgattctgaacatagaactcctctctgccacctttgatctcttgtcctccctcacttccttctttgccttctctcagtccttggctttgctgatgctctgttccctggcatgcttcctggtctcccaactcatctctattcttgggcttataaaaagttttttccgcctccttcatccatcttggatcctatggttgattatatcaacaatggtcttgtatgtgcccctttctcctctttgttttttgtcctttcccttctttattagtcacttagttctcatccttggggaaatactgctactcatattttccaattctcttccaaaactatcaacatagggatgacaggccagctgtattttcccatcacacatgctctccttccacacttgaacttctgttgcttctcagctgggcccttaccacttatcagtactcctagggatcatctctaatcacttgcctactacatccttccctgcattcaatcccagtgttccctgctccactcaaggaatggcagttcaggaaagagtactcattataccacccattgtgcgaagcatttgatatgattgcatatattcaaacctcaacctggtgtaggtagtgttattctcatttttttcatatgataactctgggactgagacagtaacttacacagaactcaaaaaaaactttatgtttcatgtctgtttgattcccacacctgtgggttttcaggtcgtaataaagcctccactgctgacctgaccttctgccaagtttactctgtagattacttagtttctttcttaaatgagataaatgaacctgtaacatgggactttccagttccttcttcttttccaccacattttttttgtatcttcatccatttccttctccttcttttctgtctaaaagaaggaattatcccctaatcttccttacagtcagctcctctgcctttgttatggattccaactcttctacctctttctccagattgatgatctgtcagttatcctcctctttctgatcacttttcattcccccttccaaactaaatatttttctttcacagcaaacaaatctgtcctcttacttaaaaacaaacaagcaaaaaactacttttcttgactttaagatcctgaacaagcttatcttctacctttcctaaaactccttgaataaagagactacatttactgtttttaccatctccccgcaatgatcccaaatcattttcaatgtggcatcttcctctttcctgatcccaaaccatttccttaaagtatataccaacaaccacataggaacagagccaacttctgtattctgggtgctcatttttcttaagttttctgtagctttgagtgcttcaacactatctcttcttttttgaaaaaggctttctcttgacttttctatgttttcttggttcttttttcacctattggcccacatctttcccaggtgctctttcctagctaatcttcttcctttatttccattttgtctctctttactctttcctttaagtaatgtgtcttacttaactgcaggcttagaagactatacccttctctaactttgacttttcaagtgaattcagtttggacatctccttcatttgtttcactggcctcagatttactttgtctaatactaaatctatcatcttatttttctttcccttcctgttttttttctattaataacaccattattcaagccttaaatcccgttgctcataactatttctttcaccttgttcccacatgtaatttgttgtcaattattttccagccttttttctctccacatctgttgaatatttcccaccttttcccctcttgctatcatccaagtttattctatttcctatcatttcagtacttgttttattaactagtttcttaccttatgttccaatgttctttcccataactaaacttggtgcagtaaaatccatgccttatgcttttcgggccctgtacctatgctcacagtacctctacagaatcttgttttctatttcttatttaaatcccattattctagggagtttgccataaatacatttcttccaggaaatttttctggtcttctgttctctgctttttatccctaatctggtaagaatctttcttgcccctaaactcctaaaacatctttttctcatacttctagtttattgtcttaatcctaatagaaaacaatagcaagaatgaacttttgagcccctccacccaaattgactcatctttatcacttactagctgtgtggccttaaactagttatttcacatctctgagcttcatattactcatccaagtaactaaaataataaggcctggccttcaggtatattgggaagattagaaacaatatatggcatggtccttaacagtgtgtttggcccagaaccaccattcaatagatgttgagtgaaacactttctctaggtagagtatggggtgctgaagagtatgtacagactagggtatagagtaggcattcaaaaatatttgcacagtgaaagggctgggattataagaggcaaacatctaccatcaatcctctgtcagttttaaaatctgtccaccagatatcagagaagaataaaattagactgggtgaatgtctgacccatttatcatctatcagggagtaacttttgcctgaagacatccccccaggacaatagaaaccagcattctaacattgaatttcaactgtttgtagtgaggacagccatccctggtcccattttctgagctgagtattaaatttactgtttcctaagcttgaaggaattctacacttgcatgcattttaaaaaataatagctattggttgtgctacagtgactttgccaattcccttagtttccaactctgctaatatccatcctgctcttaacagcttcctgacttgtttcctttctctagtcccagtttgcttttctcttcacaagtgatatccacgtgggtttactaatcagatttgcatgtttttcaatagcacactcctcaaagtgtccgttttctatcagctaaaagaagcaaaattaagatcttttgttttccaacatagaagtgtgtctgcatgttccagagtgtggttttggagttcagactgcctagatttgaatcctggctcaagcccctgttagctctgtgagtctaggcaaactcatgccattgcggacctcagtttgtttctccataaaataggaacgagaattaattatgtctaatctgaaatagtatcattgggagaacctaaatgaaataaggcaattgaaaactcttaagatagtgcatatctcattgtaagagctcgatatacattagctgttaataacaacattttatcataaatcatttataactagcaacttcatggttgatttatgctttagctttccaaattgtatttctatttattcattctacgtttgtggatgtttatttttttgttggtttgtttttattatcccttaggatgaaatttcacttaatgagcgaggcttcatgttgtcccaactacccaccttgcacagcgttgacatctgagcggggatagtgtgagcaaaagataatggactagaaagcatctcacactctacagtggagatcttctctcaacctctaatttggtggttctcatctttctttgctttttcctgcttcagaatgcctaatgtactcccatcaatatcagtagctggctgattttcatgaagtacagattaaaaatgagcaatcggaaaactgactcagttccagggtgcctgccagcatacacagtaacttcatacaaatcagagaaaaaccaccctttgggaacagaggcaaccccataggtgcgtggcttgacagtttaattgcttttgtgcaagagaaagtagttcgttcttaggggtcagagtggggaggttgtcacccttgaacttgaacacagaccttggcagctgaccctggctggatgtcagccctatccactccttgacttagcacaacctgcatggaggccttgtcctgtaggcatatgtctccccacagcaggtaggaatcaccgttgtactcggaggcaggatcgcttccccctcgcccctacggtcagctctctgtacctgggggatccgcatctgcagattcaacagttgctgattgaaaatattcagaaaaaaaaaataaataacaatacagcaattaaaaaatagtgcaaataaagaatatagtatagcaactattaacatcacatttacattttattaggtattataagtaatctagggcctattttaaatgtttaagaggatgtgcataggttgtatgcaaatactattccattttttatcagagacttgagcatctgtggtttcagtgtctgtgggaggtcctggaaccaattcccttaggataccaaggtaggactgtatagtaacatctgctctgcacctcaccatcccaccactacaaggtacctctttgttgcttttcctggatgatgaatctgcaagaaagtttgaaagccatgctgatgaaagtttttctgctggcattaaagatgtggcaagctttctgttaggtaggaatgaaaggtggggacaaattcttttccttggcaactgcatgagagtatccaggaaaatcacattcagatgggagatcatttaatgcagcctatggagggtgaaaacagaactacatttgtcagcatttacagccatcattgtgttccctcagcaaacctccccatgctgcagcagccacaccccgcagtcatccatcatgctggctgaagagccctggccgcctgccacacacgtgccaaggggaagccccatgccccgttagtgtcagcatgtgctgtgacttgtaacaaagacaggaatgagtcctcgtccagatagccatgtaatcctcagagaagagtgcactgtggctgctgcaggcttgcccagaaagtctcctaccatctgaagggtaattctgatggcagaaaacattcaatcccactattcttagcctgactttctacttctagctttttcaggctcatcaaaccctctaaaatcatttgaggagaagaaaatgttcttcgttgcgttctataagggaaatatattgcaaaaaaaggaaccataggcgaacaaagaaagggaggagatggggccacccctattcttccattaaatttatgtcactcagccttgagagtcaagcaaaatgtttgaggccaaatacatcttttattaagttgtaatacaaagataagttatctagatttttgactgatttggcacttcacaatgttatactttttcgaatcccaaattctagcaactataagatgccactgtaattttgtatacctttagaatacattaaatatgatacaatgccttattaccccttaaaatttgtattttatatttatcaaaagagcacttttagattcactttagacacaggcttttgtgacatatcactctttcgcacacagaaaaggaaaatgaaagtgaaataaggagaatgaggtattccttagccttcataaagttggaatcttctgaatcactgtgctgctcaaagtcactgatagtcaagttttcttttggcataggatttgcctctgtgacatcagaaagtattgatgatgtggcctctcctgaaaacaaaacaaaacaaacatacaggcttggttttccaattttaaaactatattgttgttttgcccccccccggtaagtctgtcaactgagcacagtgtagtttttacatccttactttggtgtttccctgagctggtagagttgtatttgagacaaaataactattcattcaattggattgctgcattctacttcagtaacagagaagaaaaaccagcaagatatccctgtaaagcattgctatggttttggaatcctgcagataaaatggaatgtcttcaggtgtttgaaaatctgggtcatatgtctctacttgggaacttgaaaaatgtttgataaatgtgtttgatttcaagatgatggtgtttcttttggtttgtcagaaactggctctgatacatatttgtaagaaagaggaaaaatctcgaattactcattagactatcaacaatatgcccattctttgaagtctgactgaaatcctttcttctctatggcatcttctagatttccgcttggactgatctccactgtatctgaatttctatagtgtttttgctccccttttccattccttttctctatttttagtttttttttttttttttttgagacagggcctcactctgtcacccgtgccggactacagtggcgtaatcacagcaaactgcagccttgaatttctgggctcaagtgatcctcctgcctcagcctcccaagtagctgggactacaggcacgcaccaccatagcaggcaaacttcttttgtatacataggacatcactatattgcccaggttggccttgaactcctggcctcaagtgatccttctacacatattttacagctgtgaacctccatgcccagcctggtgtattattttttaaatcagacttttaaatcagatttttaatgaggttttttttcatcagattctgtctttggatacctgttatattatttttaaaatttgacgggtatgtgcgagttttaaaatttgagacaaaaagttggataaaagacatctgagaggcaatccctctcagttggacagggagaaaggagggagagaggaggggagtaaacccaatgaagggtacattaacaaatgggttattgctgtggcaacaagggttcatttttgttggagactgtggtagcctgaactatggcctcaaaaagaggtccgcgtcctagttcacagaacctatgaatatgtttccttgcatggcaaaagagactttacagatattgatgaagttcaggatattgggatgggaggattctggatgatccacatgggcccaatgtgatcgcaatggtccttatatgaggaaggcaggagggtcagagtcagagaagacaatgcaccgtaacagcagaagcagagggagggaaggagatgtgatagtggaatcagatgttgcagtgacgtgaggaaaaagccatgagccaaggaatgcatgtggcctctgaaagctggagaacacaagggcatggatttgctccagtgcctccagcaggaatgcaatcctgcccaagccatgatttttgctcagtaaaattcatttcagaatattggcctgcagaactgtaaggtaatgcatttgtgttgttctaagtcactgagtttataggggggttgttacagcagcagtaggaaaccaatagaagggttcatttttctgagaaaccatatggaccaggcttcatagctgtgccagtgaggttcgaggaggctgaggtatttgcccatcaattctcatcacttactggataaggattattcccagaggtggcagctttctatcggttctggcttgttcaagctgtgcaccctcctgtcccctctaggggccagagaaagtctttagaaagacaggtctatataaaataagatgccataggcttgtctacaacttgtctactgatgatgcatgtgacatgtgggatggatcaagggaagatgggtgcactggaattacctgccaccatgtgtaagtacgtgtatgcatggttgcgtgcatgactgtgtgtgtgtgtctgtgtgtgtgtgtgtgtgtgtttcttcctccccctttattaagtttttttgagcctagacgttctctcccattgaccagagccccaagcacagcacccaaatctgggaaaaacacttcttgaatgattgggtggcagaatgtgacagcctgtgaatgtcacagtaaataagggagttggctattttacagtgatgtcttctctaattcttaaattaagactgtgcagagaaggaagaattgctattccttggaaagattcaagagactctggagatgctatgtagtttggttgcaaggtggctgtcaatcacaaatgcaagttgtcaccaggcaaaatggccctgtcctgctgcgtgaccaatctgcaatctaagactggctcatcaaggttagcagataaatcaacacaaaaagagatgaacattgcaggcagtgctgatgtcaaacagagatttcatgcatctggcagaaaattgagcatattggtaaagcactaaagacttccttcatgaaagttctttgctccctggtcctgaaaggaaaattagattaatgctcacaaatccttcttgacatctgaaggatggccttctcttgacaaggctctagacaggaaaatgtgaggaacaccagcatggccttccctttgctaggtatctaatctaacctagctttctggaggcacttgttaagtactagattctcgctctctttttttttttttttttttttttttgagacggagtctcgctctgtcgcccaggctggagtgcagtggcgggatctcggctcactgcaagctccgcctcccgggttcacgccattctcctgcctcagcctcccaagtagctgggactacaggcgcccgccactacgcccggctaattttttgtatttttagtagagacggggtttcaccgtttttagccaggatggtctcgatctcctgacctcgtgatccgcccgcctcggcctcccaaagtgctgggattacaggcgtgagccaccgcgcccggcctagattctctctcttaacccttggcattattattatttttagcagttagcttcagcaagtgaagcactgctgattggagatgtgttttgtattctgactgtacttgcaagctctaccaagtacattagccttcaaaacatatttacgataaaggctgagtgcctgttccttaagagaaacctgcagaatggtctttatttttcacaccagctgcttcttcagatttgaacatgccagacaaatgtttgatgctcttgaatggtgtttgagtaaattaattgacacccaccgactgtcaaaatgtatgtattatgtatgtaaatataaaaacacctatatgcatgaatatgcagagatatgttttaagggtcattttgtggctaaaatatttgaaaataataatataagtaaagtatgatatgaaaattaatcttgtagaaaagtcagcagaacctaatggagattttagtgtagagaagaatgtgattaagccacagtagatccagaattttgctaatgatataaagtccttattgttaccagcctcaaggaaatccctgtctagtgcatattcatggagagtgaacgatgagcttgtgaaacatgtgagatgcaagtacagaaatgttggcccaactctattaaaaaccaatgtgtctcataattaagactctaaacacccccccttaaaactggccaaatgttggaatgagctggtgcccgccgcttcttaactcttcgctccagttttggggtctgtgcctcataaccatagtcacttttaaccaattctggttgcctccctgacagaacctgggattctgtgccatttctatgtgtgcccctattttaggaactaggtctaaagtaattaacagtttagaagtgataatctagtgaattagcttttgtgagggttgttttataatagcacaattcccttgttcactgcctactcctcctctgccccccttctccactgccttctcttccctgtcctgccctgtggatggctgcctgagttcttgctggctagcctctggttgggtttgtgtcataggggtgggaaggagtcaggttaccaggaggatgggacattgggagaaagtgattcgtgtatttcttacttgtctccaactccccatttcccaatccttcatttccccatgccactcccttttttccccacctggctatccttcccacccctgcgttgataccatctttttggaatgacgttgtccctccatgactgtggttagctgggaagcctgtacttcccagctcctgctctctcttgttgggctatggttacattattcccccacacttccacctctgagtgtctccatgtatcttgcctgtattttaaccatgcctgtgtcttcgtaagtggtccctttatcaaatttctgcatttaaaacatctatggaaatcctatttcctacctagaccctgatggttacactttactttctctaaccatagcattcttcaaacatgaaggaccacacgtatttaatatttaatcataccatgcttaagttgatacattggaatgccatagttctcatttcgctagcatgctattcaaaactttatttgtgagagaaacaaaaatagaagatgccatgtaagataacattatggtctgggtttatctgcacatgtcagtacatacctgcagagataggatctttgtctatggaagcaaaccaggaaggtatctgaatgccttggttcagtacccatcactctggaaatgactgaatgactgatgtgctttctaaacatgaggcagaggctggccaaatttcctttcaatctgggtgatgaaagctaagatgaggtaaatgttgtcacattgtgtttacattctactatatagtatatatggtatgtatatttctatgtatatgatatatatgtttacctacacatgtacacaatagagagagataatctcaaatatgaatggtactgcttaaacgcagtgttaactaaaagaactgcattacataaataaatattatggttataaaagaaaagaaaagccagagagcctactctcatgctttcgttgtatagctaaagtcatagaaaataaacattaaaaaaaaaaaactaatatttacaagacagcatacaaatgtctgtagtttaatttgggtataaacaagctacacaggtgctgaaggaattgcctgcagttaagagagaaggtgactatgcagaaataaattctaagacagggctggcttctgcccttatggaaaggtaaattagcccactgatacataatattagtggccaccaaaccattgtgacatcttgaatttcttctttttttttctttttctacggaagtctttacgggattgttagaacagcattggggggtttgtgaatcattatttattttggaggtatggagggaggtagcaaggaatgaattgtcatacccacacatgcctatccaggctcggatttcctcctttacttcaggccatacagatgattccactgtcctcttctctgttctcttgaaactgccactgcctgttccatcccaggctttctctcttaaacctggctgaagtaaaagccaagatttcgtttatttccttcttactcttaaagaacaaactcacagttactttaagttttcaaggttttttactaataagtatggtataataaagatttgacagataccacaccaaagaagatatacagatggcaagtaagcatgtgaaaaaatgcccgacatcatatgtcataaggtaaatacaaattaaaacaacagaaagatacccttacacacctattagaatggccaaaatccaaaacacggacaataccaattgtcgatgaggatgtgcagaaacagaaactctccttcattgctggtcttggcatagggattgtaaagcttaagaaaatacattgaagtccttgatctactgtctctaacccttcaaagggggtaaactcttttgtgcgaataccaaggtgtgagattgctgggtagtgtgataaaagtatattgagttttgtaagaaactgacaaactgtcttctaaagggctgtaacattttgtatccccaccggcaatgaatgagagtccctgttgttccacattcttaccagcattcggtattgtcagtgttttggatcttggccattctaatagatgtgtaatggtatctctttgttgttttaatttgcatttctcttatgacatatgatgttgagcatctttacatatgcctatttgccatctgtgtatcttctttggtggggtgtttgttgaagtcttttgccaatttttaattgggttgttcatttatttattagtgagttttaagagtttcttgtatatttaggataaaaatcctttatcaagtatgtcttttgcaaatattttcactctatctgtggcttgccttctcattctattgatgttgtctttcacagagcagatgttttttaattttaatgaaatttagcttatttttttcataaagcatgtatttggtgtcatatctaaaatgtcaccagtatatccaaagttgcctaggttttatcctgttatcccctaggagttttatagttccttgttttaaatttaggactattattaactttgaattattttttgtgaagtgtgtaaaatctgtgtcacgatccatttcttgcatgtgattgtccagttgttccagcccagtttgttgaaaagacttgcttcattgtagtgtctttgcttctttgttaaagattagttgactatatttacgagggtctatttatggactctgtattgttttccattgatctatttctccatccttttgccaataccacactgtcttgattactgaagctttatggtaagtcttgaagtcaggtaatatcagtcctctgactgttttccaatattgtgttggctattctggggcttttatctctccacataaactttagaatcagtttgtttatatccacaaaataacttgctggaatctgggttgggattgcattgaaaatatagattcttctttccaactgaaaagttgggaagaactgacatcttgacaatattgagtatttctatccatgcacatagactatctcttcatttatttagttctcctttgattttttttttatcagttttggagttgtcctcatatagatcttttacatattttgttagatttacacctaagtatttcattttcaggtagctaatatagacggtattttgtttttaatttcaaaatctactagtttattgttggtacataggagaatgtttgacttttgtatattaaccttctatcttgcaatcttgctataattgcttattttctccaggatttttgggtcaaacctggatttcctacatagacaatcatgtcatctatggataaagacaattttacttctttctttcccatcattatgccttttattttattttattttattttattttattttattttatttttcttgtcttgctgctttatctaggacctccattgtgatgctgttaagttcctggtctgataatttcaatattccttccatatctgattctgatgcttgatctgtctcttcaaacttttgcttttttcttttagtaagtcttgtaagtttttcttgacagccaaacataatgtactacgtagaagaaaaaaaagaacgacaataaataagcctttagtcatgtggtggttagatgtcaggggaggggaagtattatatagttatgtgattagatctcagtctcttggcaaccctgtacctctgaactgtgaacatctcaagtgtttcttaggtcctccacctcttttaggtggggcaagagggctagagtaaactggaattaggcatttcctttcttctatctggaaggctagagtgggctagagttgagtatttccctttccccaggttggttaggatctgatagaaccccaatagtttaggctcaggtgaaatattttctcttgaaggcaggccttattatgacacacagaatgctgtggcatgtttcaagatgtttcttcttttttcccttcccacttctggaagcatgaggggatttttctctaatattcattgtgagaacctggtccagctcctggaggtaaaaactcacaaaagcatgatagccctggatgaatggatccccttggagtttccatcattcagactggtccacatggagcctctagtaatccgtcagttagagtttaggcttttctactccagtactcgttcctgcggaggcttctgctaagggatttctgctcagataagttgtgattctctgtacccacctgtctgtctctccagttttggggacagcagtttgctctgtgacctcacttcttcgaaggatctaaagaaagttgttgctttcttttagttggtttagctgttcacgtgttggcacatgtgttaggacagagtgacatcttccaaactccttgcatgttgaaccgcctatatattgttattctcactatctaggatgtctaggaaagtaagaaaaagatcatgtgctggctctcattttgtcatcctcctgactcttcattttctttgagcctagggacaaaaatgaaggcctgttactttgtaagaagaaaaatgtcacatgttcataagtgaaatactgagcaaacatcgactcgatttttccctgaggaattgcttcaatctacacaaaagctccaccttcccaaagaggtccatcaaagtaaatctctaacatttgtgtttaaatggatagttatttctactatgagcacatcctgaacttcttttcctgccccagcaggttttcctggcacattacaactccaggctatcttgtatctgcttactacagctcaagcaggagaacagattgatttttgatgagaaatatgccttttctggggtttccttattctaccacaaacttggtccagagctcattgtttgtgaaatactgtcattcattattaagacgaacaatgatgcctgctgtgggaaatgtgcattttaaaatgcagttttcctcctttaaaattctgtggcttatttggtctcttcattctcctgtcattcgtcaaacacttgctataccccaagtgccttgctgtggttaagaggaatgagccaggttctgtctgtttgagggaaatggtacatgcatcacttccaattacatttctctaggcattttcaggagcagtaacttatgtatgggtaaaacttagaaatccaaaaccagccaaggggatgttttaggtagaatagtaaaagatcttgtatgcaattattgcatgaatcgcagtcgattactcaggtcattctaaattcattttagatgatttaaagaaacgtatccatattactaggatgtggtgaaatccactgtatagcaatttggggagtttaagaagtttcctttgggagttgatattatagacaatgacatgtattttataatttcttcagaggtttggctataaacaagacagttttgttgaaatctgttcatctactatcagttcctcttcctcaggaagagaatctgaaaaaaaaaggtaggtaatgtcaagttccaggggcagagaggggatagtgaatccatacttgatcttaaaaattgagcccacctatacttccagtcatcactctgtggcacattgaagagcatggagcccccacctggttttccaggcctactgtgcacaacagcattcctgtacctttaggctttcttatatctttcagctttctctccttactaagcaaataagatacatttagggaaggagggctaacaagaagacctgtaggggagcaaaatgcttgtgacttgtgcagtttagtcttcacaacaagagagagtagacttatcccctcttatatgttaccggtgaagacattgaggaatagagacctgttttgctcactcagattgtacttttcaggggaaggattcaatgcctggtaggtctgactctaaagccagggtttctcttgaaccagatctcagctctctttgaattcatcaaattggtatgaaggatttattatgcagagaatatttttaccttggacagatagtcagtaattgaagccagattccaaaggtggcaaagacctagataggaatgaaaaccatcttcaagtgttgtatatcctcagagggatttctgaaacattgtgtgttcaccagcagcattagttctcactcaatgtatcagtcatatttttccgcattacaaacaacctctaaaaccaagtagctgacagcaaatagcatgtattgtcttatttacaagactgcgggttggctgtggtttaactgatcaagactgggcttggcctaaccaagctggactcttggcttctgctgggcacaggtcttttccttctttttcatttcaggtacctgtctgaaagggcagtagttatctcggacattctctttccataccagcaaacactttaaaacttcacatctgctcacataccactgactaaagcaagtcagatggccaaagtcaacattgatggggcagggaaatatgttccacccagggtggcaggctctgcaaattcagatggcaaagataagcgaagaattgggaacacttatctaatccagcactctcagaaagtgatctaaaaaaggtgtcacaagagtctaatggtgttactgctcatgtcagacttgaagctatgtcctctgactcaacactggaattttaggaatgcctcacttgatatcttttggaatgtctttgaaaatgagttttaggatgatgtcctccagcagattttaattatatcatataatgtacttttaatcacaaaattgtatccaattatgtattatttttaatcataatcttagtccttcaaattcttttcatctctgtctcaatcagcaatagtgtggctgccattgtataccctatctaaaccatagaatagaagtcttgcccactggaccacccttttttaggcagattccacgtgctaccagcggatgaagtcagacagaactcagaatagagtgtcatggccaaggtctgtcttaagattcaaacatgaaaaggaaagattctccatgccaaatgttcacctcaggggagctgaacactgagaagttttacagaggaattcctagaattttgagggcagtttacaaactcaggccttcagggggcttgactatcactgaagagcaaaagccaatagtcaggggatttgagggctatctttctttcttctacactaagataataagggtgaatgctgctgagacggtgatgacgtgttcagcatgcctgcctctggagaatcatgcacctgtctgtgcctgtgagagcataaaagctccatgagacacaagtggtttacatcctgggagtcagtaacaaagctaagagaccctgtctggtgctgtgtccctgaaaggggtccttcagtctgtcctagtctagggatcctaggacacaggcctttgtcaaaaccccaagccaaggggacctagctgtcattctcctaggtcgtgtttttaagttgatcaaggtcacgtgcatggagtgtctaggccagcagaaactccagagagcagcacagaagtttgtatcctgccctccagtgagagggcttattctcataggcctcaggtggcacagaatcactgcaggatgctaggcagcctcctaggacacaggatcaggcaggtatttctcatgttcccaaatgtggcatgacaccatgttgagcacctattttgctttgagcccgaaggtggaaaggagaacaagacagacagagctctgtctcatggagcttaaattccagcagggtggacacacaataaccaagcaaacaaaacggacatcatttcaggtagtgataagagcagcaaaagacccctgcaatccaaggtgaggagtttagattttgcccatagtgcagaggaagccccactggggggctcctagcgtggatgtgacatggtgtgctttatgtttggaaagatcactagctaccaggactatgcaccatcgaatgccacccattcaataagcagaaactgcattttcatctctcagtagatcccaatatacgccttttctattcaaatgtgatgtcctcaatgaactcctttgattacccctgtagggaaaatgttcttttaaaaaagaatttctaaaaaccctattccaggtgattctatgagatctttcatctcctgtctcagaagacttatccaggggtagcaggaacagcttgcatagaatagaatttgtttcacgaaccatttctccagtcattattataattccttaggcaaaagatgatttcaaaaataccctccgaaatagacactggagctcataagtttgaggagctgatgaagcttgcatagattgtaaccttgtgtcctataaaaatgcagttcatttatacctgttttgcagagcagaggaaacacaacttgaaaggaaaacttcatgttttgcagttttttaaataaatgaaagaaaaagtgtctcaagaccaaagctgaatatagtagaatttatggagtatcatttgctttggcacacataatgtcaagtgaaatgaaagaatggtgtgaagagatgaggatgagaagaagtacagaatttcccttttccctttttatattatgactaattctagaggccctgctagggacatcagtgctaagttgaataaaataaaggaaggggtaagacaggaccatggggaaagaagcgatgtcacaaaagttctgtagtgagccagtgggccacaaatttacacgctccagtcatgtccagagtgatggtacctaaatgttcaagtgtaattgagccatcagaactgccagcttttctaccttctcaagagattccttgggccccacacacactctgcaatgaagacattaaatggtagaatgggtgctgtcacctgagaaagagggtagcacatctaattccatgggtcctctgggcatagcttatgcagaaggccatgtgtttggtgctctgaaacagctccctgcccacaggggcttccaatctgatttcctttctttggggtttcaaaccgtgtaacatccagactggagtgtctgacatagaggctttctggtatgttccatccattctgaggaccaacaacatgccaggttccaggctccaggctagggtatggagggggtgtgggctggtatactggtcctgtcccttgcttgagtcttccacgagccacttttcctctcctgtaaaatgggagatattatatacattttgaagggagttttcaaggtttgatttattttttgtggaagccagaggtggtttggcttctaagaatagcctaggctcccacccatgcccaccacagcatatcattactttctcttcaagcagatgcaagtccaaactgccttactgggttatattgagtctattaaaactgcatgacaaagtcacaccatactttgcacacctcttggcatttccttccttccttccttccttccttccttccttcctcctttccttccttccttcctttcttcctccctcccccttccttccttccttcctcccttccttcctcccttcccttcccttcccttcccttcccttctttctctctttctttctttccttctttctttctcctttctttcaacagggtttcactctgtcacccaggctggaatgcagcctccaattcctagtctcaagcaatcctcccatctcagcctcctgagtagctgggactgcaggcatgtgcctgggtgatttttattttttaattttgtagagataagatctctctatgttgccaagactggtctagaactccttggctcaagcaatcctcctgccaaaacatccccaaatgctaagattacaggcatgaaccaccgcacctggccttgggagttttcaatataaatccaaattaattctgttgaggtgatcagacccaacaccaggtcatgggggcgacgaagtccaccggagtcaaaggaatgagaaaaagtttgagagagaaagtgggaccagggagccatcacgagtggggaggctacgaaggtcccgagctctgggagccaaagaaacaggtagtgaggatgtgggggttgaaaggaagcagtgtatcaagtgaatgagaaacatatggctacttgagctaatgggagtgatagaagcaaggagccagcaagtctagcagatatgcaagccctacctcaacttctgtcccaacactcagcttttctcccaacaaattatctttgcctctttccctcaatacagtaaagtccaattacattgctgtccatttacagagcaactcatcttcctttttcttttctcttctactttccattgtattcttatgaaaattaaacgaggtaacacagataaatgctactaagtagagtgacttatacataataattgctcagtaaatgctaacagcagcggcactagcagcagtttattattatttcaagattgctgtcttgtctagtgagccaggtgtgcatgccaatgtgtgcctggactagatgacctttatactccccgaagtgaaatattatgttaccgtcgtgctgacagccagtgagctccccaactcctccccaattaattagctattttatagaacatttctctactgtgcatgtgctagaggttacaagtagaatacagtggagaaggggtgatcgcaagatcagacatgacacctcattgtctcagattcatcaatacattttgacagctgtcatggtttgactacccccaaaaagcagatttaaaggcaggggtttgtgtgtaagttgttaatttgggaggtgacttttggaaagagagacaaagaaaggaagcaaataaagaatgcattatcatgggatttgccactgtgggcaagtggagtgtgagctcactgagcaactctgggaaactataaagcacacacctcagcattatcccctgaggggtgagggagctgaggtgttagttaacccaacaactctcagtaatcattggttgaagaatgttttgggggtgccttgttccctggtcctttagacctgccctacatgtggcaaagtgagctctggccaccagaaggagcccttgggtaaaaggggctggcaccagaaggagccctcaggtaaaaggtttaagtcaaagcagcttgcaaggacacagcatatgccaagaagatacatgcagtgcatcgtcagcatctgctcttgttacccaacttatgaatatgccatgttatgtgtataatactcatataccaaagccagatcacaaaacagctgcaactccactctcttaacgacagactgtggccacctcacccttgcctactaggtgcccctttgtgctcctgggcgaagccagtgacacctttttagcattctgctgctgtgctcactgcagtaataggggcagtgtcactcttattacttcacctgttttatcttttgtgaaactcagcccttagccagaatggtctgagtggctggtctagcaagtgcttaacggtgaggctccttcagctcatttctctcaagtaatttgatttcattgcactatcagaattgcttttatgggttggaaggaggcctagggggaagaggttgacaaaagctgttttgagattaaaaaaaaaaaatgtattgcccagtacctgccatcacatcctccatctacaccctccaatctctcctcccgtgcatggtagggtgtgcgtgtgtgtgtgttcaggagaaattaaaataacaacacacaatgcatctcacatttgtatttcttttcacctgagcttgaaaagtatactgtttgatttcctgtgatccccacaacagaacttgtgtgctaagatggaaaaatattatggctatgttctctgaaattatcaagcaaagtgtaattttgcattgacagtcaatgttgacaatccctgttcaactgatgtcaacatattgatcaacccagtgatacatccttctcactcaggacaatcataggtttctatcagtgctgaaagtctcacgtttgataacttcataatatttttattttgagggtgtgcacgtgaataaaaataacacggtgccatgctttcctcattaaagagttggcaggaatagagagctcagaagtggatgtgaatttcatgtgcagagttcaagggagtttgatttttttaaactgctgctcctaacttctggatatttataacaatacagtaccaatttagagcttttagttacttggaaggctggttagtatagcaactactttctaaataatatgcagtctacacagggatttatgatttcataaaattgctggtgttttatcacagctttgggccccatgctcggctgggtggggtgaggatatggatgaaaaccctttgaggttaaaaccaccacaaaatacatttttcagctgaaaataaaatgattgagtgcataaagaatagtttttagatttgtgagtttcgcctggacattggtctctagagcgctgccttcttacaaactgcaagaaaggcagttaaagctgaggtgagacctggcaacagatctagaaggggatgttgacggaagccctgggcagactctgaatggtgcatggggttaaggttttaaagcctggcttaaatataccaaattattattataccaacattatgttcaattttattttaatttttttctagtgagaacctccttgaaatgattgatttaaagtatcaccatatgcctttctatgatatggtaatctatagccccaaatagactttcattttaaagtttaaaacaaaagctaatctgttgcttctgactccaaaaaggacagttttactggcagagtaagtcatgtctatctttattttagtggaatatgctagagttctagtaaacatatttgaattttatatcaggtgaacaaaattagtttctacatgacagcctttggacaaagttaaagataatagggaaatatcaataacagtaaaaaataaaaagtaaatagagaggaaaattgtccccagcaaagtgaaaaccagatttactgtagctgcattggaaccattctgggttttcaataattccaacaaacatacagtttagacatggggtagaatcttcaatgagtctttattgctatgtctttctgtagtgaaatttgatgaaaagaaacattggcttaataaccaagtgaaaggaaaatgtccacctaatgagttatttgatgtgctatggatgaaaacaactgtaaattcaacttgctgtttcacttctgtctcttttatttaaattgtcttgatggtctgctgacagaattggtcctttcttggcttaggaacatcactgctttgcagcgagaagacaggcaaatcataaaacttgtcttggcttctagttataaaaagtattgactagcctaaagctatctttaatagcttgaaatgtggtcaagagaatttaattagaaagtacatctcaacatgctaaataaatagatcagcagagattattaaaacacatcattttacactttcatatacttctggtgggagtgttattggcacagctgctttggaaaactggcagaatctcccagagtcaagcataacatggagtccagcagcccttcctcctggatatatactcaacagaaacacatgcttatgtccaccaagacatgtatgagaatgttcatggcagctttattcatattagtgtcaaactgggaatagtctagttgttcatcaacactcgactggataaacagattgtggaatatccatacaatggaatgcaacactacaatgaaataagctactgttatatgtaacaccatgggtaaatcaggcaggcataattttgaacaaaatatagacaaaaaagaacacacattatataattcatatatgtggagtataaaaacagacaaaactaacctttgatcatagaagtcagaatagtggttattttgagggctgggcattgactcaggacaaggcagctttctggggtattagaagtatcttataccttgagctgcataatggggtgtgtgtgtgtgtgtgtgtgtgtgtgcgcgtgtgtgtgtgcgcgcgtgtgtgcagtatataaaatatttgcaagcactttcaatacaaaagtaaataagaaaaaaatcatttatttatcgtataagtcaactttcacatttacaacaaaagttaattttatgaatctatgctaatgagtagaaaactaagctttggaatgccagtagaagcacagaatctgtgtgcacctggatacacacacatgcaactccctgcatgcctgaccctaaattattcatggcttgttcagcctcattgaccctcatacttggaagaaatttcccatgtcatctaattcagtgattcatctgaagcttgtctgtagcctcccctccgggtggccattctacttttgtgaacaaaagtcccctggtgaccagaatatgttgtgatgttctgaggaaggcctttttctcttggaagtccatccctaggctaaaatctgtctttgtctattcattggtcttatttataaccccggaggtcttgtagttaagtggagaaagaattgtcctgttgctgtttatcctgaacatcatgctttaccttgtatatccatgtccactgaaagcaggcatattatcagggatattcatcttgatatttttctccccttttaattaatcacaaaacatcttcctatgaggaactagattttcacataaatctctatatttttccccagggatgaaaagggatattctgaatataacaatctgttgagtaccttctcagcatcccttcctcctccccatactctaaggctaaacacccctgtgctcccaggagtgagccttttcctgttgtcaatatgtacaaagatccacaagtctgtaatccagtcagtcattcaacacctagttattgatcattctctatgtgccagcaatgttttaggtatccagtgataagcaaagacagatgtgttatctgcctcccagggttttcactctattaaggttattaatcacatatttacataaataaatgcagaactgcaactgtgatgggtctgtgaggtaaaggtacatggtattatgaaaacacaacatagggagtcatcagtgtcagagaagcctttcctgaagaagtgatcacctggcagaggacaaataaaatggatatacactaggaaaaaaggaggagaaatgtcatttcagaaagaggaaagagcatgagcaaggccttatgacaggaaggcaaaataaaaataccacattcaaagaccagaaagaaggccagtgtcgttgcagtggaggaaacaaagagcaatgcaacatgagatgagactagagagacaagaaagggccagcttattcaggggagaaatgttgccactaacttggggagtggcttgaagctagagtcggcttcaaatgattgtgatgcttgtgatgcttgtgaaagagtattccttggaaagtagctgagcaaacaaactaacgagaaaacaagttttgagagagctgtttaaatcagtaactttgaatcgggaatgttgcatcaaggtccagggcacgatccatggaggaagttgttgtggaagatgagcgggtcaatggactggctaagcgcggggtgggtcactcttgtggatgttgaaatcacgtggggttacagcaaaccttgaggttaagatgaaaaccataactcaatgccagatgctctgatgaatatgagagagtgaccaggaggtcacaaataattgagaactgaccatagttgccatggttctatgacaacttgtataatttctctgtggggaattatgtcttctaaaggtgaatgttaatactgatggtcattgcaactgagtgtgattgcagtatttattcgttttttatagccctataattttatgatgtaagtacttattcaacatacctaacatttggagaagaattttatgagatgagaataaataagagaagactgagaaataaatctagaaaggccccctggggtcattggaatgtgtaacacaaagctaaggtgcctgtgtttattctgtgttggagagtcaacaaaggctgcctctgttttgtgtaaggttgaggtgtaatgctaactatgcctatgcctaggaagaatcacttgaaagtggcttgcaggatagattggagaagggaaggaagaccaaaggagcacagctgtcaactacagttgtctgggtgagggccgatcagaccttgaatgaaatcaatgggaaagggaggaaaggaaggggcggtggaaaatagttcagagggacaatgcctttaggacttggttaccaacaggggagtccgtcaaacatggcggtaactaggagagaggtaaagccatagacagaaaccagaaagccagggatgacatttgttttaggtaggagcatgtattgcattgctggtgctgaagtgtattaaagggaagtatccaggcgattataaatctagatgttaaattcagggcagagatggactgaaaaggcctcctatggttaatcccctaacaggaaatgcccatcctggcctccttctccttctttttttttgagacagagtcttgctctgttgcccaggctggagtgcagtggcataatcttggctcactgcaacctctgcctcgcaggttcaagcaattccctgcctcagcctcccaagtagctggcattacaggtgcccgccaccacgtttggctaagttttgtatttttagtagagatggggtttcagcatcttggccaggctggtcttgagctcctgacctcgtgatcctcccacctcggcccttcaaagtgctggagttacaggcgtgagccaccgcacctggccgcctccttctccttctttgcagctcacccgtactctcattctgcttttctctcccgttcatttttcctaacctttcccattgattcctcgggactcacagcttatttctgagaataatgtctccttggttccccattttacagccctcttcctcaaatattctattatttcctgcaagcctcacacttctttctaacttagtcctctttatctgtgtccacatacccctaatacacttgtcatgctgcattttgtttgcctctttacttgtctatttcctcccctagactttgggcttttagaggacagggactcattaaaagtatgacatagctactcgtgtggggttcagtaatactttttaaataaattaactgacaattaactttaaagaaaatttaagagttttacattttggtgcattcatttaaagaaaacgaataggattaaacaattcataacaaatgcacaatcccaaatgtggtagacattgcaaaggttcaagaacttacgcacattttctgtataacagtcattgtctctaagaaaaattaagcttggctctgatttgttttgtcccctttcttaatgaactctctagcaaagcctgtagaaacctaatcaggaaagcaacacatattcttggaaatggggacaatatctgtctttttcttgtcctctcactcattttttttctgaagacgtactgagatctgaaccatcagtttgaactactagaatacatatttgccctccaataaaactgggtcttttaagtcttggttctctccatttccgcaacgtctctctctttctgcgtctgtatggaaaatgttccaggagactctggaccagaagatatcctcatagacaagccgtataaggaaaaaaagagggctgagtttaggatgctgggaatggcacacatttaatgaatgccgctagaaagaagccaggaaagaattggtcaaacaggaagaataagacgtggaagaaggcagggttgaaaaattcaggagaagaagtcacacattcatcaagacagaagtagattaatggttaccaggggctttgggtgacagattggggagtgaccgttaatgggtacagatttttgttttgggatgataaaaatattctggaattagtgatgatggcaagactttaaaaacatggtacaaaccactgaattgtaaactttaaaacaataagtaataaagtttaaaaaataaaaattctgtgagaggagaataaaacataaaaaaactagtcaaacacatctaacactagagagcttgaagataaattgaaaggtgatgggatttggtgattaggaaggcagtggtgagctcaaagagcgtagtttcagtagcatagttactcctatctcttctgcttcctgctctgtaaatatatacattgataaggttattccttcacataccatcactattggcagaatgtttgatgactctgcaggtccaggaatgtgtttggtttagatcagctatggtgacattctgaatgtgttttggagactctgagcatgtacgcttctgctctttgggacaaagcataagtctgtcattcttgctgcccttctaaaaccaaacctatgcaacaagacctgattatctcatgctgtctcaattccaagcatcacctctgatggccccaagtgaaacaggaaataccctctttgaattctgacaataagtttctgtggtatgtttcattggtggagttctgctggccttgtgactggcagaactgaccctggactaactgcatgttttctctgagacacatgtactttttttttaagctgaggataataaactttaatctgagcacttcttacaagaaaataatatgaaagtatattgtaatctattatgcatatgtaaatatgtttttaattgatattgttataagattagagacacaattaaattatttattgtctttttgttttttaaactctgtactggtgtaggaccagccttcttaatgcctgtgtgtaggatcacaggcttcatatccatgtacatcttactgaggcctgtacttattggttgaactgaatgttgtttaaatgagaaaactccagtatcatagcgtgattagcctcccttttgccttcatctttcgttgttcatttgttttttcctgctcttcatctaggctttcccaacgagcctgctgcagtcattgccctcaacaccattaaggaatggcttgccaagaatcaccatgaggtaggaggaacgacataatcagtgaacatccaagatgatgtaatttgatgctcagttccccccaaaaaagcacataaattttataaatatcaactacacctagtcattgagccaaacctagctgaccattcttcacttgggttacatgagtaattaaatgttttttggtaattgatagaatgcagcaactctattgatctatctggtgaagtgaccagattcatttagccataatctaatttttttacattggtggatagtatgggttatatgtgtgaaaaagagaaggggatggatttcattaagaataaggagttttcctatgctattttccttaaagctaagttatctttgttgacttgaggttcctggtgtacagtaattgtctggtatctgtgttctttggatttataactaatcacttccctaaagtcacttctgagtgtgagattgaagtgggcttgtataattgatcacaaaatcgttatgagcgggatttcttatgaaactaaataccttcatcagagtattcatcatcctcctattctgcttacttaataagatctttgtgatacgtttagtgatgaataggggaattactcaagtaaacaaagcagcaaaataactagagaccgtggagcgttaaatttcagagatttgtcagtttacatattgtaacagctaggaggtttcaggcaatgcacagtcttatgcatttttcttctgattttgtttttctcctcagttattcacataagggctataaaaattgtgtttcattttctgatggaccatgaatttagctattttccttgggtaggagatgaattatttggaaataattagatatggaaacaggtgacggggttttcaaatgagaaagcacttggtacttttgtgtgtttgaagaaacagcagtgtcattttctaattattgtaatttcggcatttgttgaccacgtggccaaacctatccatttgggtgcttaccctttattttcttcttactttgaaatgtataaatatggcaacttcaatttaaaggatatcttaaatcacctaaaagaagcaggagaaaaacaaatagctaaaatagccagcttacaaaacatgtctttgacacattttattttcttttcacaacaaccttatgaaatctctagggtaggtatatgttatcttcatctgcatttgccttcaaaaggttaaatgacatactcaagattggaaagtcacagagccaagagactaatccagctctcataactcactggacgttcctcattggaatgccaccaaggccagaaagagaaactcagttcctttaaaagccagttatcttcaatatattgcttggtcatagtaaatgttccacacctggattaactgctttgcaaaagtgtagcatgttgcatgagtgaaagttgataactgagcaagcgtatcagtgcatatccatcatttccactagaatagtaatccaaggatatgccccactggaggaagttttcatgcatcatcttgggatgtgatggacatatgcataaagtcatatcatcgaggatgtagtgatgaagaataaacatgttggtcacaggtacatctcatcaacaaattctactcattgattctctctagctaaattattcagaaagttattttccatagaaattttctaatctagtgttttctacttaattcacttgcctaccctatctttgagtccattcttttgctttcatatccttttatttttctgctaatttcttgggtccattgtagaaaatatagataatttggattgagaaactcagttattgctattgcaactgtaaacatatcctgtactgattcccttttaaaaaagacccctagtttcaatattctaatttaagcaagtcaatttgaacatatcaggtttttctaaataaatgaattataattggtaggtcttagataaaagctaaataaattgattagcagtattttgatttattttttcctctgttaaaacaaacaacagactaggttaaggacttataaaagagtattgcttctaattgttttctcttcattgcagtattattttgatgttctgattggttaagctacttattcattaattcactcatttgataaatatttattgactccccctaagcaacagatacttttttatattccagggacagagcactgaaaaacaaaatccttgctttgtcatattggtagtctagaaaaaaaaattatgtttgcttaacataaattaagcaaataaaaaataaagaaatagggaagttcaaagagtgctttacaaaataaaacagggcaattggagaatgtgtttttaggtagacgtgctgaggacgtaatcttggaatacagatttgtacaatgggaaggaggaagccaagccatacagaggtcttgagttaaaacattccacacagagagaaccataggagaaaagcctggaagagagaatgagctcactgcttgctagcaatgatgagacccaatgtggttgaagcagagagacgaaagaatggcaggagacaagtttggagaaatagacagagtcagattatagggtcttgtggttcatagagagactgtgaattttattctagtgggtagttgttgaagtgttttgggtaggagaataacacatataattcaccttttaaaaacaagcctggctgctcttccgaaaaggatatcttatatttataagatatcagagtaggaaatggcagaccaattaagaggatgctgcagtaaatccaggcaggagatgagggtgctctggaatacagtgatggtagaaaaggaggtaacaagcgtcaagtttggggtacactttgatgatgcagccaataggactagaggattgttttctgttaggatagggttatgctgcagttacaaactacccccaaatcttggtatcacaaacagcaaaggtatgtttcttgctcacactgtttgtacgtcttgagtcagcagagggaactgacttacaaatccgggctgacagatactttaccatgtgaaatatcatctatcacatgacaagaaaagatagataatcaattcccttgtagaaatgtttctacaaaggaatgatgtatataactttcactcacatttcattgtccagaaaaaggcacccagggactaagttccaggagacaagaaaatgcagcctttttgtatgttcagaatagagcaaactgaatattgacaaaaattagtaatgtctgttataaatgtaaatcagatgtgatatatgacaaaaagagaagaatcaaggatgacaactaaatttttggcctgagctgctgggtaaattttggtgcatttactgagatgaagaatattggtataagagcatgtttatatgaaaaatataaagaagacaagaattgtgttgccatgctacagatagttaagtctgaaatgattttagatatctaatgaagatttcaaatagacaattggctcttggagcctaaagctcaagatagaagtaggaaagaaagaccgggtgatattgatcagattaccataactttaacttgggttcggcctcagtttgagattgcttgcaagaaaaaggaatatagtcaaactagcttacataaaggagaatgtgttgtataagtgaactacattcttaaaaaaagtcttgaaatccaagggccggaactagagaggggtctcatgaattatagaatcccaaactataaatccaataagaaccaaggtagctcattttcattctctcccactccatctctatctctcccatgtctctgtttcattattattatcatgttgcatgttatcttttattctcattcacctgcttacgcgtggccccatcatgactgtgtctgtccattcatgggtcaatcagccctgcttgaggcaaggcctgggttcagtggataaggttgcattttctgaagctcttagctggtgaggttcccccaaaattttcctttaaaaaacaaaaaagaggaatctatgtaatgtgagtctcccatcagtgctcatgcttttcttattcagctgagtttattattcaacattcacaaatttcatagtttgtggctatcattccccataaataattgaggctgtcatataattgatgagcttttacatttcaccattaacttactctctgatttctaaaccatcaggaatgtgcactttttctttcccaacacagtagttgatttgcttatgtttaatttcataaatcaccgccagctggtgtagctggatacttccacacccagagaggtctgactagagtcccagtggtcaggagggggaaaatcatattctgttgcccaccatccacttgtttaatttacccaaagtctgaactccaagggcacagcatatatttaagaggactcagaaacccgaggggaggaacgctgctgcacacacagcacagtggctcaaacagtggcagctctagcagaagagctaaagcagcactttaacaaaaagaaaagaaaaaaaggagcattctcaaaaggctgtaattgaggcacaaaaatgacttagaactgaaaaacatgatgactcttgagttgaaaatcttaaaaaaacaaaaaagaatattcactactgagaaccgaattattgctatgagaagatcagatagatgaattatctcacaacacagaagagaaatacaaagaaatgacaatcatgactgaagaggtaaggtggcagagaaacccagggatcaaacatgaggcaggcagggtctgaagattacccactggcattttcagctaaattaagtattaagaacttctgagttcagaaaaccaaaagaaaagaatatcagagttggcagtaaaaattgacagcaggtagcatgataacctttctctaagtgcaccatttttctcaagtagtaactttattacagaaataggtgagcaaaataagggactgttatggaaatgaacagtagaaatgtggcctagatttctaagttggggtggctgctctgtgttatcaaatgcaatttcatgcattccttatttttcatgcaatctagaaatataattctttgcggaataggtatttccccactctgcagctctgagaccccctgctcatatctgaaagttagcctaagaaatgtttttacagtgcctgttctattgttctaccccagggactcatatggcatttggctattggtctctgagacaatgcacatatttgccattttttccacagaaaagtagaacaggatgcatttcacccttcagagccacaaatgtcctgatattgtgagacatttccaagtcatggtggtcatattcaatatttcagataccccaagggagcaagcatcctacagcacatagcaccatgtgttcgttttcccaggaagtcctgctagtcagggaatacggcttctaagatgacgattctgagctggaggatcagtggatttcccaggaacttttaaatgtggaaccctaaagtactgatcaaggattagttgtaacatgaaggaaacctgaacccctctcctcctaccatcaattataaagaagcagatagatggacagaaacccagcgttctaggaggctctaggtaaagctgtggccacctgcagctatccaaaggggagcccctggttcccctgaggcccggccccagcatcatctctgtgggctgttgaggatggactccttcccgctgcactactccaagggaattccctaatatcctccctcctatctatactgctctcctccctagacagatcccattgctctgggctggggacaattcaatggagaagtgtttggttcatctttgaaggcctttggctaggtcacctgcctagacttggaaatcactggcaaggaaaaaccccagctctgcattttcaaaacccaaatgggttttcttttatataggaggaaggtggtacttttctctcctcgcgtacaaggtttgggtctttgcccgacataattttttttaactatgcctttagcacaaacagattgttgttcaaaatgttaaatatcatctacttgtcatttaaatagtttactctgtgccttcggagggaaacacaacacctgtggtattgctgtttgtcacttaaagtagcaagcctacagatgtggcaggggatcctgagatgctgtatatgtgtggcagcatcgctctgagacagatgtccagctcggcaagttgatgccagccaaggctcccagacctcacccagtgtggtctagacctcaccgtaagatgccgatagccagagacaaaattagctttgagttcatccttgatgtcctttggaagtagagacgttggtttctactgcgtggaagcagttagccttgtcaccctcccttgccttccagtattcaggcacatgattcacaaactgctgaagaagctgaacatatttctccaccccagaaaacagaattaggaatccactgtagaaatgcacgtccagcctcctgagtggttcagatgctgctctcatgctgatttgacaagatcgagaacacagccacttgtttcctcattactgatcacaaagaaactgttgcactttaacttctggtgccaagactatttttcccccttcttggcagaggtctttgagcatatgcagtgttaaaaattgtttgccacttttatttcagcatcacgttatggatcaccgaaaaaaaaccccagtgtggggcctgccttatgtctctgacatgaaacgccttaggatctttgtgattcttaaaaagggggtttaaatgaaacatgaaatgatgcttacatttatgatgggaaaattatatatttcgaaacaagctccaaattcctgtggactattatttacacttatgcaaaaggcataatgtgccatcctccaattctatgcaatgcaggggtgtggttaacattcagagacctggaaggagcaaaggaaatgctccgtgctctctctcaggaatgcctttttatgtccacaaacatcatctgagtacctattatggtcttagtttttggtggaatttagtgttaaaatttgtgcacttgaaaaaataaattgcagctttgaaatggtcacatcctatgcagtaatgtggttatggtaataatcatcatcatcctaatatgctgccgtaaaaacgtatcctttgagtagcccaaatgtgtcgttcaggtggagccatgacactcataggctgtgacaccactgaggacagttagtcccagattttgcagatacgctgtgtcgcttttgctcttcaagaacactgatgacttgctaacattttatattttctctctacctctttatttttctctccctctctccctaccgttctctttctctctcactctcctttcttccctcctttccttctgtctccctccctctttcttccttcctccctcccttcctgcttctcccaattccctcctccctttttccttcctttttctttctttctccttccttccctccctccttccttccttctttctttctctctctccttccttcctttcttccttcctttctttttcttttttattttcttcttttctttccttttcttttttctttcttttcttttctcttctcttttctttttctttctttcttttcttccccccaccagcccgccccagcccagacaatcccttatcactctgagtctgtcattgtcgggatttgtgacaagcagttattgttcccacggttagaataaaagctaatccccaaggcagcttctccccttctgatgggggtgttccagtgcttggtgtcaccatacactgccacacaagagtttgccaagtggacagatccaccgacacttccagcttcaccctgctttagcatctctcacaattggcataatgaggttttggagccagaaactaaagccccaagacaacatcaagggttgctttcaggctccatagccctgttgtggtcaataggaagcacagtgcatgggaaaatatgcattttgctgtttcagttagtgagcttattaccagttagccagtgatggggagggctctaattacacacttttaggcgttgagctgagcttgcccaaatgccctgtcacccattcttactctggtggggagctcatcaaagttcaacaaatgttttgttttatttcctcccagtaggggatatcaggcaatcaaggccttggggtgctctagggacaccaacctacagtcctatgtagattagggtggcttgctgtcttctgcacttgcatataatcaatatacatcctcctcagccagccctcctgaacctagtactatgtccattatgccccactgtatctagataaacagaatggagtgcatgggaatgcagagagaacctagaaaaatactctgctgggggtgagtggtttggggggttgggattttgtttaaataggcatggagggtaattcatatatactgctaataggtctagaccttctagaaagagttctaggaggtatagaataggtacatgaaggagttaaagagggaagaaagaggtaagggaaatcaatatttatctgactcctgatgtgtcccatggcagaggcatggcccaaagatgcattctgtcttcacaaaactctcttcaaggtagttattttaaaatctttaatttcctagatgtgacagttaaaggaaattttaaaagtcaactaataagatactttcatgttctactataaccttgcttctgtggcctgtctagcgttgggcaccttacccagatttagccatacatgagaataaaaccaaaatagattgattagggtctttccatgggatttctttgccacctggagtcaggaataaaaaatggtggtgaacctgagggatgtggagcacagctaccgtgttccctaccattttggaaggttcttctttaagaagataatttgaagatgtcccagatttgagggcagttggcaagagtcacagaacccattctgttggctcaagtgaagaaccaaaactgaagcaaaaagcagtatattttagcaaaatgcaatggccacccattttaagtttttacaactcaaaaaataatttttaactagagaaaagaaaaggttgagaatcatttggagggttatttttttcaaaagtgtatgctttaaatagtttattctactcctttcagagaacctgtgctatgttgaaccactgtttatgatgagaatattttacatccttcagatgtgttggctggaaaaattttgagagtcactgtcctaaatagtaaaattagagtgctttttataaaatcagtctttcaatattcccttcatactggaggaccatcaaaagatagtaattaactaatgaattaattttctgatggctgtatttttctccttctttcctgcaacctggaggtaggaaacacacattaacagaagccagtgctgaggagagactaagaaatagcatgagacaggtgaaatgcaaactctttaaaatcaaacttcagggtgcaggtattaaaaaaaggagagagaatgcagtttgctcagatgacttggccaggatgttcctagggttgggattggtatatctgaaaaagaacggatccctttgcaaagtttggcttagaagttccaagcctgcaggaatgtactcaggagctcactatgtaacagaagctcagctcctcttccgtgcagcaggaatgggaattgtggctcctagaagtagagtggtaagaggtagggtgcagttataaccaccactgtgtaccctcactccaaagaggaagtttggtgttctaatcagaattttccacactcttacatagccttaaacaattaactccatctctctggactcagtttcttcatctgtaaaatagggagggtgggcatgtctcttctagcttcaggattctgtgccattgatgtgtgtcttctggagcaggcccactgatgcatcctggccatgcctttgaccatgtcttcatagcacaatcagacctgtaagaaggcttacactctgtgattctccaggctcctccagtggcataccaaagatcaagcaacatttgcatgtgctgtctgtatgcctttaagatgattaccaacccccatatgggtgtatctttagagttgatattaacaaccttgacccatttagtgtagaaggagaggccgccatgttgattttctgtaaatgatccggattatatggtggtttcaaaatagccaacttttaaagctccttatgaaattaaatgtgctgattatccaaatgatgtgacatttttataaatagaaagtaaacctctgagcatgtggttggaactacatcagacacagggataaaaacaacactgggaggtcctactgaaggacattctaacaaccattttctggagatagaagcatgcaccttcatcccttctaggtaggaaggaaaaagaaaccttttccttgtcctctaccttgatggactaggactcgtatgctgccctgattgaagggaaaattaacagttttgatacggtcatctagctcaactcagggaaaaacaaaaaaggcatttcccctttctagtggaagtaaatgatttgcttgttgatgggtgatgttttcagccaggctgctgtttccgatagaagctgtgaccagagctgaaccatctcattgtttctctaatcacgtctaggcaaagaggtggctcctctggaaagactagactcctttgatgatgccactgctactcactagggtaagaaaaccaaataggtctggcaaaacacttgcttctccaatttcatggctcaatggaaaacatactggaaaaaacatccgaagactgtgggtctctggccatgcaccgctggaggctgtaacggtgagcccagtgacagaagggctggctaacgtgctgtcctgcaatcagttatgtcgtctacatttctatttatgaaccccttcgaagtccatgacagaaagccccaaccttttagtgaggagactattcatttgcaagaagcagagaatagaagaatattgggggatctactattaactaaacttgtgttgaatagaagttactaaaacctggtcagattcacatctgtgattccaggttaagggcctcaggcaaggaagcgaagccccacgtggatcctgaaatactggccttagactcgattccacagcaaaggttgcagccacccagcatctgagctgctgggcaccagggcaagtgatggccagtgacaggaaggagctatgcacgcatatatcctctgttgtgtgcactctttaaaagaagagataaggagaaaaaaatatttaaatgatatcatttaagtttcacaataaaccattgactgaaataagacatatgaattctcttttcttccaatcggtccaaattttcacatgttccttagcttctttctgcattgatgtgatgctaagatgtaaagacttttagttgttgttgcttctctgacactgctcctcgatataagcgcaaaacttcaccttttgatcatggggtctttaaaaaaaggcccagcaatctcccctaaagctggagacaaaactgggtttcctggacttactgagatgtgatgtgtcagtttacaacataaggcctttctaatgaattttaaagaaaaattttgctcatgtgaaattttcactttatgtgctgaccttagagcttgaacattgcataagaataactcagctgtatatattttgcaacataaatgttgcctgtttgtaaccagcagatttcccttaggctgggcggcttcttctgccctgttacctactgaagtactcccctaatgaccaagaggttgctcagcttgtcagtgagacaagaaaattcttggagatgtgacaatcattctggacctattcctcacctgtaagataaggtgaaagtcatctaggaaaaatccttaaatcagatactggggcataccctaaatctactgtatcagaatatctgagaagatagtggcctatattttgaaaatttcttcaggtagtggttgagaaagattaggccagttgctctcaacaatcttttatggctaagacatactgcaataaaaactcccatttgttctcttcaataaggaaaaggctatgttaagtgagaactgtgagagtaaatctctcctctcaaccagtttacgactggccttctaacaaggggttaggagtctagggttggggctgtattgtctagctagtcctggggtggccacagcttactttctactcacaagcacttgacatgggttgaccaataagtgagtttgatgaagtttacacataatgtaactcaactcacattaaatatctttgggagttgctagacagcttttgtggcaccctgtaaacagtagaggccttttgccatcttttagaaaggattttagtatattcccaatatcctgttgatagtaatcattgtctctggatattgcctttgatgcctctatgcaagagatgcatttaataaattactaaaaatcattagcatacacaacttaattcttctttgagtacttattgtaggcagatttgaaaataaagccaacagggctatctcatggatcttatgtaattatattggttcctgaaacaacttttgagagtcaagtactcagtcatctgaagcaaattaattctccctggacatgaaggtgccattaagcatagcggcaagagatgattttccggttggtaccctgttgtcctttactgaagccggtttacaccaccctcatgtgaatcagaccctggatgtggagatacgtgccacccacggtgcttctaggtccccccaccgctggcacaattagatttctttaaggaattaggaaatgaaactctatattaaaattcattgctgagaacactacctaccttaatattttctgctgttcaaaattttcctctgaaaacaattagaggctgatggggtgtgcatttgacagtgcaaatggagctacaaatgacctgggtgggcttcagctaagcacagggcagcttaggaatgtattaagtggagtaattatctcatatggttttcccttgggttcagtgacatctacaaagttcgtttttctaagttcctccttctacaaatttaaactcaagggaaataggatccatatgtccctgattaatttgcactaactcatcaaacgttcttttctttgtaacttattagatgtctacagaggatttcaactgttttttataagttctttcaagcctttttgtctagaggcaggaaatggccatttgccagcagcaagcgaacccctaaatagtcacgttctgttcgggagtcaaaggaaaaagaaaatcccctgttttctaagtacagctgggtaatggttttctttagaggtgatgataaatgtattctctgaaatgtattattagacttgttaaatgtgtaattaaagggattccatgaagttgttgcagcaggaatgggatttaaattgcccccaaacccccttccacacacacattattactttacctgtgaaaatcttaaaagctgttggtttacccagcagcttagagccttgaactaagtgaaacatgaaatatcttcaatatatgtaccagaggctctgcgtgtgtgtgtgtgcgtgcacgtgtgtgagacattgacaagagaaagattgatatactcaaaccctacatcatactgtttttcataaatttccatattgaatccaagagacctcattttgaggatttaaaataatgtggcatcttgcttcattaccaataaaagtaagctttttggcctacccataataccccagggtaactggatttcaaaagcaaatcaacttgagcttggtctttcactaactaaaaatacagtcatgtgccacataatgacattttttgtcaacaacagaacacatgtaaaatggtgatctcataagattctaatgaagtagaaacattcttttcacctagtgatgttctgatgattctgaactgatgtgggcctaggctaatgagtgtttttgtcttcatttttgtaacaaaaaagttttaaaagtcaatgaacagatttaaaatgttaaaaacagaaaaaacttacagaataaggagataaagaaagaaaatatttttgtgcagctataaaatgtgtttctattttaaactgtgttattacaagagtcaaaagtttaaaaaataaaaaatacaataagttaaagttaatttatattaaagaaacaacattttcaaataaatttagggttgcctacatgtacagtgtgtataaagtccacaacagtgtacagtaatgaaccaggccttcacatgtactcaccactctcacccactggctttcccagagtaactcctagtcctgcaagctccattcatggtggatgccgtatgtaggtgtgccattttttaatcttttctactatacttttactgtaccttttccatgttcagatatgtttagatacacaagtacttatcattgtgttacaattacctacaatatggagaaaagcaacatgctgtacaggcttgtagcttaggagcaatagtctgtaccatataacctaggtgtgtggtagtctgtagcaccaggtttgtataagtatactctatgatgttcaaacaatagtgaaattgcctaatgacacatttctcggaatgtattccatcattaggtgatacataaccatatataaatgaaaaataatcacaggcattgaagtattgagtgcttcctttgtctaagtaccttacttgaattaaataatttaattatcacaaagatgctatgttatagtcataattattccccttttttgatgagatgagaaaacttagactttaaagatcatacagcaaataaatggcagttgagtttttaattcagaattccaagttcataactacaatcatcaaaagcattgtattttcccttaatgataaaagtaaactaccgtatcagagatctcctttcaatgcttatgaatctcactacagtctaattcagatctcttctagcattatcccatgtcaccctccatgctgcagctcatacaacttagaaagagttgcttggtaatttatttgtgaaaccaagatggcaggtccatggtttggtcaacttttattgtcttgcctttagcacaatgccaggaccatactcattgcaagttgaatgaaataatttacaaatgggaccttttattatccagcctgctgctcttataagctcctaaggcttcatgtgattagaactagagctgaatagtcatttgtggtatcaacatttctaagccatggatatttccattagttcattagtcaaacatgatcaaatgattaacaagcccaggaaatttcaaaatctccctgagagcaggaccctaatagtgactaatttctcagcgatcagtgctgcctttgttgcaaacacatggctcttgagattacagagtaaaatctgtacttactcctgttatctctgctcaaatactgcatctttggtgaatttttccttggccttaggaaaacttttcccttccaaatatcactgtcttttactgtggttgtggatgtacctgtcagctttcccactgactcaaggactgcaattgtgtaaattcatccatgcattgtttttgttttgtgttttaatccaaggagcctggcacataaaaagctttgacaaaaatgcattgaatgaacgaatgttttgaattgtttcttaaatgatggagctgagcatgtataaagccagtgtatctgtctcatacagattaagattcaagccttgaactctgttcctatcctcaaatgaggaaagggactgaaaaccagccctagtgtgcagagattcagccagactctggatgtagcccaggcttggagaaaattctaccctgctctttcctttatcttggacagatggcagtgtgctggagttaggcagctttagactgttgtctaaaatgggaagcttatcctcaggacaaattggagacagtcaagacttcagaaagctcacccccaagcctgagcttatgatctgttgatctatagctgatgggcacacggcttaccccgtttgcctgctttgctttctcttttcctgcaaaggcttgtgtgattttaaacaccagacaaccttggtctttaggtaactgcattatccttttttcagttaatctacttttaatttttctctctttttttagtccactcaacattgtcaacactgtcaaagatgtcaatgttttcatttccagttctgatgatactattttttaattgtcatgtatttccatatgtaacctgtttctgaaaggaaaatatgcccttcaaaaaaaatgttggcagcttagatttcatgtgtaattctttcaaaagcctctcagtctttatttatttatttagcaaatattcactgagtagctggcacaccctaggcattgcacactatttatacaaaagcagttgatatacaattcctgtcctaagaaagcttacggtctgttggagaaaacacaaagaggcaatgatcacaggataatgtggaaagtgctaggataaagggtgcccagggcagtgcgggtgctgggcagaggacagagtcaaggaagactctgggtgcgttctggtttgaacagaaggtagagggcagcctgaatgtttttcctggggctttttcttttccttgggagtgaaatccaaatgcctgtcttaccacaagaccaagaacacctgatcctcggtccacagactcaagaggtctcagagagtttgtaaatttggggcaaagtttacagttattttcactaacctctagttaaaatttagtactttctcccatcatgactgtagccgcaaatcacagtggtatcagcagtctttgtgactttgttatcagtagaaatcacagatatttcctatcacataacagttgttgcagagatctcaaaacactacttatgctcatcttgactttgaattatggtagacccaccataagatcttgtttcaatgtgttcataagtagtatgcaacgtaaccacataacacattgtttccttgtaaatggtatctcaaaaaaaactgtttcttttgtaatcttttgtatttttatttatttaaaaaccatattctgggaaggatccataggttctgctcaactactgaagaggtccatgttactaaaaagtcccggtggccaccacataccatttctcccttgctcctaccctccagcctccttggcctctgactccacccgtcaccctcatgctccaggccaccaccacatttgcaggtccccccacttataaggctcttcctaaagctctctgctcacactgacttcttttattcaggtcttatctcacacagcacctcttcacaaagaccttttcctgaacccccacacaaagtagacctgccctcctttcactctccctcacttcaccatttgatttttgtgtacaattcatcgctactggaaaagcgtatatgtattggtttatcggctgtcatcttactagagtggcacctatatcagagcaaggacttcaaatggcttgttctcttttatattcccagaacattgaacaatgcctggaaggtagtaggggcttaataaatgttcactgaacaaaaagtaataaatgagcgaatgggagggggagtagagaaaggggtatgccagacagcaatcagcgacaaagatgcagaggtgacaagaagcctgaatccaggagcgtttactgcaaagactgacagcaatgggccccttgtgcgcagggtcccttggccctctcactctttcctggcccctcagcagaaataaaacaggctcataggactctttttgataagagtagagaatacagtttgaagaactcatagtcttaacagataaatctggaaaatgctaatggagcaggttgccgagccatttcttattgcccaaccctgctgcctctttcacctagtaaagatgaacagacatgatttgcataacgtgcaggcacagaccatcaaaagtctggaaatgaatagagctggcaacagacattcttttcaaaggcatctgccataaagctagactcctgagagaacttgcagcatacaattttgggtgcccaaagagcatgctttatgagggagaaaaaaggtgatgggttcattgttgccagaatgtagtgtcttgacacacagtttgagatgtctgaatctgacatttaatagctgagatgatagtggtcaaatacttctcgaggtcagattcatgcagagttcctgaaaaggtgagaaatcactgagatctgtaatgacaaagctgatgagaagattgatgaaatggtggtggcaacaggacaagtcttcaaaatagcttgtgaatgatttattttgtagcagcagagccaattgacaatagcggattgctaattaaataccaaccactgggaaaataccataaatttcttttggctcagtattggcaattgtgtactttgaagcagaggccaaattattttccagtgagtgcttcattttagacctaaattttgtgggcctccatctctttttgctttcccttcaacctccagcatatttgatttaaaagcaaaaaggagaagagggaagaagaaagaaggggaagaagagattgaagaagagaaagaacaggtgggaagaagggaagaaagagggaggaagaaagacactcccaagtgtcctaataacatcctatcagaaaggcttatggccacgtgcggtggctcacacctgtaatcccaacactttgtgaggctgaggcaggaggattgcttgaggccaacagttcaagaatagcctgggtaacattgtgagaccctgtttctacaaacaataaaaaaaagtcttgctttcattcttttccagtctgtggctaattaggaaactataataactacagtttattgagaacctatcataagattggtgttttgctaagtgtttatgttcagtaagagttaacatttactattttctatgtgccggacattgtgctaagtgtgaattctcaccaggacactatgaagtaggaactgttaactcgctctttccttccttccttccttccttccttccttccttccttccttccttccttccttccttccttcctttctttctttctttttctcttgctctgtcgcccaggctggagtgcagtggcacgacctcggctcactgcaagctccgcctcctgggttcacaccattctcctgtctcagcctcccaagtagctgggaccacaggtgcccgccaccacacccggctaattttttttgtttgttttttgaattttttagtagagacagggtttcaccgtgttagccaggatggcctcgatctccttaccttgtgatcctcccaccttggcctcccaaagtactgagattacaggcgtgagtcaccgtgcccagccgtttctctgtttttcttataaatgaggaaactgaggcagatagtcttgtttgaaatacactgccattttttaatgagtgtgagaatttctgtaaaacaatttttaaagaaactttttatatgaaactagttgataagaattatagtttgctaagaaatacaattgaggcaatttaaggagaatctgtaagataaataagccgtatatttaaattaactgctggctacagttaggaaataaaagagatggagtcttactcctcaaatgagtaaagtgcgaagtgacctcagtttagaaagcagttaagatgggctggaagaatgaggtaagaatctggtacctagagaagccttatctccctctgtccactctctggtttgcactaggttggagaaagccattcttggagtcagggattaatgaatgtgggaatgcagagcaaaatgaggttgctctccccaacagttccataatctgaacctctatagctgattgtcaagggccgacctgcaaaggcttttgtggcaaagtcgaggagaagcctagaactccatgcgatgcagaggagtctcttctgttggagttaggggaagcggcgagaataaaagaagcactgcaatcaattccaacaaataaaatgagaactgggaaaacttatcatagaaaaatgaaaacttataatagaaaaatgattaatgatgaaaataggtaaatgtttctttaaatggctttttggatagaactgatctatttttttcagttaatgtagattaccatttggtggtatcacgaagcttttatgtttaaaatccacactgggaaaggactaaataaagttccacatggatgtcaggagaagaacctgtcttataattttgtgaagtgtctagattggggcaaatacccacagggagtggttatggcatggagaccttccccaacatggtggaaccacactttctggagcgagtcaaagtgccaatgaaccaaagtgaatgcagtgataactgcaagagcaggccatccatccctttcaccctggggtgatgactatagcgatgccagcgtgacattgaaaaccaggacacattaacacatttgtcacccctatgtttttaaagcttaagaggagcctagagcttcaagattccctctagtaacaaagacccccaactgccatgacaattaatcctgtggaaagctgagggtagagtgaacagaggaacggcaagatcccattggctgtatggtatgccgggtccctctgtggcactactgagagtcagacgggcccctgatatgctgcatactgaagagactacacacatgtatgaaacagcaggtggggtttagatattctctgatcaagttccttcacttgtttctctgacagaatccctggcctgtgccttaacaacatccacacattcatcttcccactacttcttgataatgagtttgaaaacttgccatggactgcacatagatctcactagagttcatggcggagctgcagccctcaacttcagccagcctttcattctgtttctcatcagatacatttaatggcaagtgggtgtttaaaccacagggaagggacagcaagaacaaatatataattagacatgtttcctggctgtgtgctttgtggataggcctgtaggttttctcctgggtgacttgccctaattgtatcatcagcttcccccagcagacaactgggctgagtttgatccatgaacttgaagcacgaggtgaagaatcgtgcatctacaagagcaattataattataattaagagtgggttggttttcttttcggtttgccttctcgtttttcagtgagcatggcagggatttccattaataataaagacattctagagatgtagaattaggaactggtcgactctggttaattggcatactattgtattcccataaattctgtctgggactgctgtgaatagatttaaagctactaggaagaaataaaatatacagccctttacaatgaagttgttttaagcttgaagcttttgtgtttttagtgactttgaagccggataagtattaacttgagtattttattgtggagaatgctaaagtaacggacatgataagagtttctggtggatattcataaactgcctttggatctgggagacagagagttttatgaaactgtgtaaaaatgtaaataacagtatggcacacatttactttctgccacctcttgggtagtccattctcctcatttcctctcagaaaaagcaagattatggacggtaaaaacccaactatatttataattgggatatgctaattgcagtattttaaagaagctaacacagctcaaaataaacagcattttcaatttacaaatagtgataacaaagattaaatggggattttctttggagcacaatttacagtggattttagtgaaagttgaaggagccaagtcagttcgtatgcagcttaaaagcatgttttaactggcgttgtcttcaggccacaggcccttcagtggtagaaagaacaccagaatggggtcagcaggtttattaactggaagtctttggacttaagttgctgaagatctctattagtttgcccatctttgaaatggagaagataatgtataattcacaaggctggtgataatattcatatgcagggtcaggactagggtgaggtaatcaaggtgcttgggatgcacagtttaaggaggcaggtctcagccgccaactctgtgcttgcatagccctcatattctgcaccccaggagcctccttcacctctctctagtcctagtgctgtaaaagaggtagccctattaccatgcctggatcatatggaggctcaaaataaaatgtttttctactgtttgtcctgtctgcctcatagatatcttttgaaaagtacatagggaaaaatagagaaatgtactcaatgcagtgctctacaaatgttagctgatactaaatcacaccaaatcactagtaaacccctgctacagttattagttgcaatggtgttctcatttgcaaagatacatgtgtgtgtatatacaaacaatagatattatggtcgtttgaagaatttcaatgaaaaatgtgtattactgtgttgagagtagccctttaaagtaggattgtattttttcctgaggacaaattataagctttgtgaaattagggatggtcttctcttgccttatttaatttgactgccagcccagcaccgtaagtatataggcaaattgtatcagaaaattagtagggttggaaaaataaatcagaactgaacattgttctagacttggatggcctttagctggcaactggtgctaactgctgggtgactggagacagcaatgggtatggcaagggtttctggtagatatacgtaagcctgccttttggatctaggagacggagagttttatgaaactttttaaaagtgaaaatgacagtatgacacaaattcactttctgccacctcttgggtagtccatctatctcattacaactccagcaaaagcaaaattattgatgataaaaatccaaccatttggacaattacaagttaaactggggaagatgcataagtaggcagctagagggactggtgttcttaccacccagaaactggatcatttgggagagaagcgcaacaaaaccagccatctatggcagtctctgacgaagccttaagcaccctttaaagagattctacaagaattgcctgactccatatgatttaaaagctaaatttattcagagaaaagaaagattttttgctgagggaaggacgttgctgtatgtttcatcacttgagtcgtggcagataatttgggttgagttcaaacacaatgtacttttcaaaatgtaaatctgtgaagaaaagctgaatttttagagccatcacagttttagaaattttatgctgtaatctgattttgtagtcaaggtcagtggctaaagaatgctgttggaagggcctagtctgggtcagacaaaggaccgatttggggaagatttggctgatgtcttcttttgtgcagggagagttattctctcactgggttttctgtgcaccagtagggaaagaagctgcacacacatggtatgtgtgtctgtgttactccaaaacccatcccaggctgtgctgcagtccttagtgaaacggagagattttgatgagtcaccaataactggtttcctgggactgatcatttaacatatacaagcgcactcagatttctgctgtggtttagaatagactggggggtgaaaacctgcccaggtctctgtttcatattgtgggaaatgtttgtcttcattctttctccatagagaggtggtttccatgatcgatggacagtctgaagtctagaataatggtaactatcatgttctgagcttgtgtagctatcatgttctctatcttgtgatgtgccaggccttattccaggtccttcatgtcgcaccagcctcgtgatctaggtgttctcttgtctttattttccagatctaggaactgcagcacagctaagttccatgatcaaggtagtaaatgtccctgctgtatgtacctcgcccgggctcacactcatcctgatgcagtaacttggaagtcctttgtctgtgtgcacattcatgtttgcttttgaagaacactgaagagattctactttgaacagaaaatatttacaccgaggtccttgttctctctgttgagtgctaaaagtgagggccaccaaggcaaagtgacaagtggtgccaggctctcagatttgatgcttctgcttggggtagatttgtgaggggatctccaactccagccctttcaggggccaaggcaggccacgtgaatgagtgaagcaggctgggcagagactccactaacttgctagtgtcccttggacacagctgcagacacttgttgccaggaaggattagccagggttgcctcatagtttaatttttctggagaagtcaagcattgagattaaaaaatttttgtaacaaatgttgagaattaattttaaaacttttttaaacagtacaaactaacccaaacatatctatgggccagatatagctaatgggctgtcatttctatataatttctgttctaggtgaatgatgcgtcacctacaaaaggctttggtttcttgatcttcctgttaggaggaaaaggagctatcacctataggaaatcccaggactggggaattgtataatagagggacttattttctgtgtagtgcctaggtatagccctgtacactttatctctctgcactataccgttccttgagcactagctacatgtagctattttaattaaaattaaagttaaataaaattaaaagttcaattacctacttttaccaaccacatttcaaggactcaatagtcacatgtggctggtggctaccatattggacagagcaaagtagaacatttctattgtcactgaggttctactgaatagtccaagtccaactctagattcttaggctctggcagcccaggctatcttacaactaaatgttctttctggtattggctcttcctggtattggccaacagttactgcgattgccccactggcttaagcttgtttgctttgcttaggtctttccattagtccaaaaatatctcagcattcggccatttccaggtgccttactgttggctcataaagatgtgtttggtgatgatgtttggtcaccaaagaagaaaggaactcttgttacctcttgcacttctccctcagactatttactgccattataatgttatatttgttgggaagtgaatgcttactctccactagaatcccactaagagccccaaggaaagggatcatgtgcttgccattttttcttcggttccctacagagttcctggcagagtggtcagccacaactgttggataaagttaagccctgggtaggataattttcctttacaacagtatgtccagtgtaggcaaaacatcattcccaacaagaaaaatggcacatctcaaaaaaagtaatttccatcatgtgttggcttataacgtgccatggtgagattcagaaccacaaggtccctgttcctttcacagtaatgaacccaaagcaattgaatgcagagctatcaacatgaataagggcaagtcaactaggactttcttatgcatccagcattaaagagtttttgttaacatccacagtaactagtgaaactttgtgtgaaaacattcacagtaactagtgaaactttgtgtgtttctgaggtcacattaaaaggcggtttgggtaggctaattatccttttatcatcctttttggtgttatgactattcaacctctttttatataaacttaaatatcctttgctcacacaatgatccagacagctggatactccttatagggtagtcaagagtattcagaggtccctcttcaacatctactggctgccatggctgagcatcacatccaatgtaaaaagctgaatattcttgggacaaattaatattgatggttagaaataataaaataaaaagatgttttatttttaacatctaataaaataaaaagatgtttttctttaagttttcaaaaagagaaaatagatttttctttatttcagaaaaggaaggatgtacggcattactgtaagctccacaaaggcaaggactatggttttggggattgtccttagaatgtctttccttcaggtccatctagtgagagtcttttaaaaaatatatcagatgctgtggcggacaccaaaccaattgtatccctcattcccttgctgtaagttagacaaaataagctagctggaccccaaatatctgatcttttgaaacaattagatgacaatgatggaatgatatataattaggaatcaccaaaaatagttcaggtataacataaatcctctagagagttgaagaaagatgagaatatttggggctaaactgatgaggcaaggctttatggaaaaagtgagaaaaattgacccaaagatgtgaataggtgagagagtggaagggaagtcattaacattggaggagagagaaaaaggagactgaatcctggtatgagccaagtagcaagaatgagtagacaggatatgtttatagaacagtaatgattctgatttgactttttactgagaaaaggtgggttgactgttttcagccaattatatatgagatgcagaagttggatctactaacttgatttagccagcaacacatagttagaaatgagtaaaaccatattgggcgtgtgggggctctgcctgtggtagttgacacttctttttttggccaggatggcttggttgatctgggcattaaaagaggatgcccttctttcctaaaagtgaccttcctagatagcaaatagaagataatgactactgtttagtcaatgaaagatgtgcagtccccaaataatcaatatttcctaggcacaattcatttatgttttgtttgtttcaaaattttgctagcaagtatctcaccacgtattggaaatgagaaagatatgaccatcttattttggtaacagttgtcgtgggtgaatgccaaaatattatgtaaaataaaacctttaagtatggggaagtaagctcactatctcagctttccctccccttgtctgagctcagagcatcaagctgttaaggactgtaccagtgactgcatgtgttccccagagaaaatgaaatgagcccaccagatatcagtaaatatttcttactgttttggtttccatgtgtcttaagtgtgaattttgagtaaaggttttattcaagcaaaaggctccttactcattttttctacaataatattactaaagtttagttaatggtattcaactatctgttctactcagcaacataatgtaatcttatgaaataagaaattatctgaaagggcatttcttttcacatggctttataaagcatccgtgttgaatgtttgatggagaaaatgagttaataacatgagaggtttatgcattaactatttaataaccagtggattcaggtaattctgtttctcctgctaccacccgaagtcacaccgctccccagattcctgatgtgttgcagccatttttctccctatatcataactacccagcactaccctgcaaatcctcagagactgcccataggccatctgatcatcagtgtaaggcttcagaatgatctgaggtccactactggcctctgcatttcttccttggagtccattcacacaatttagtaaatatctctccagtgtttctccaaaaggcaaaatccaaacactgatgtttggtgcacatgaggccaggaaagggatttgcgagctgctctagattctcatattttccaaatccctttttcttctccccttcagtgccttctgtctttttctccattttctccatagcacttatcaacacttgacaaactatatcctttgttcatttagcttgtttgttgcctaacaagttcccagtagaaagcaagtattataaagacaaggatttttgattattttatctgctgttatatctccagtacctagaataatgcctggcacacagttagtgttcaataaatatttgtagaaagactaatatagagcaatgtttctcaacctggggcaacttagccctccaggggtatttggcaacgtctggacacatttttttttatttgagacagagtcttgctctttgcccaggctggagtgcagtggcatgatcttggctcactgtaacctccacctcccgggctcaaacaattctcctgcctcagcctcctgagtagctgggactacaggcatgtgccaccacacccagctaatttttgtatttttagtagacatggggtttcaccatattggtcaggctcctcttgaactcctgacctgccttggcctcccaaagtgctggggttacaggcatgagccactgcgcctggcctggatgcttttttatcatgaggattgaagggataagcagtgctattggcttcctacaatgcacagaacagtctcttaccacaaaggattatctggctccaaatgctgaagttaggaagccctgatgtggagcacagaatccttgggagccctgccaagaaggctggctaccatctctcctgtggctctctggcttatctcctggactgtggctctttctgtctcatctcctgaccacacacttctgtttgcgttttttcatccagaaattaaaatatctcatttgttcctttgcagttatgtggtttttttttttttcagttcctttaccaccactactttaatgtagctttttgaagaagaagaagcaaatgcctgagcttagctgccatcttgaactcgaaactcttatcacttttatcttgtttgagtcaccatttctctgaagtctgtaatatgactgctaccaatacagcattctctcttctctgaattcttagaatacttaccatcagttttgaccatttgggtaatgtattagatagaattactgctctaacaaagacactcctaatgtaactattaatatatcttaaagaagatggaagtttatttctccccaatgtaacattctcaaattgggaggcctgagtcagtagtagacaccactgctccacgtgattgatcagattcaggctcctccaccttgctactctcccattcttgatcattgttctcagccaaaaggagaagagctggaagtagacagttcttgttctcagtttgagagaaaacgagaaagaaacagtcctgtttagcatttttcttctaaatatgtgctctgtgggatgcgtgtgtgtgtgtgtgcatgcctgtgtgtgtgtgtgtgtgtaagtgttaatatatttatttctggaagataggatcacaagatttgtaactttaattattttgctcctttatatttttccaattgtttttacattgaacctatactatatatatatttgtggctgacattagatattctttaactatttgttaaagaattactattaaattaaacgtctatgtaaagatcttcctttagaagggtaggaaataaccaagtggaggatagaggcttcttttagacaacaaagaactcaagcaactgtaaatacaagcaaaaaaatgtaaagccatgtttgtgattttaagtgaattgaaaaaaaaatctcttaaagtatatctttaaactgtaatagttacgtatatgttgtataacctttcaaaaaacaaatcaaatgaatcagatgtttgacacagtagaattaaaactcctaacttgactgatatccgccccccccacctttgaccgattatgttgacatttaacaaattaaagttaaatttaggagttgggagaaagaaagggaatatacaatgggaggtggacaaaacagtgtgggagagtggacacagaataagggccacggtgtgtattcagagaggtgacagacatcaacatatgttcatcagcaagtgacggaggtcaacaggtagaagaaatttgagtgaggacatgggacatttatcagcaaagacatgaaaataagacagtaaataaagcttgtatttgaaacagaaaaaattaagtggaagtaactgataataaacctgatttaattaggcctaaaaagttttatttgttacctgttagtcaccatattttaacccttctttggccatatgtagaattagctgctgtccctctaccaaccttaagagatatgaaagtggggaaatggaaactcatcccaagaggacagttgaggttcatttgatgaaggagacagaaagctttgggttaaagattaagtgatccctttgcaaattaattcttatactaaggtactgtgaacatgggtcagttttcaagggtttctttaggtttaataccataatactaagatttcagtagcatgattattgagcaacataaatagtgtatacatttttccaagctgtttttttaattaagatattatgggccaggcatggtggctcacgcctgtaatcccagcactttggtaggctgaggcgggcggatcacgaggttaggaaatcgagaccatcctggctaacacggtgaaaacccgtctctactaaaaatacaaaaaattagccgggcgtagtggcaggcgcctgtagtcccagctactcaggaggctgaggcaggagaatggcatgaacccgggagccgagattgcgccactgcactctatcctgggtgacagagtgagactccatctcacaaaaaaaaaaaaaaaaaaagatactatgaacatttttactttccatgtacgcgtataatgttttttctgattatgtaacagtctatggagtggaagttccaattaatatactcctgacaagattagcaaggttggctatcagatgtatatttattgaagaaaatatttatttgacaccacttattggtttattctttatccttagatactttttaatgaaacaaaatctttctacattttgattgtcataggtgacttatttaagttgaaaaaaataacttcgctttttttttttttttacaaattgctggagttgtacatcgatgagttaaagcttataattttaaatattaataattaagaatagagcaagtgctgctgccatttattcaaaaagaggcaagagatgttaaaatgaaatcgataaatgtatttgttgaaaattaccagaataaataggaaaaaaattttaatattttgaatgaaaaggctagaatatgacatattctaaatcccattgtattttacttctctgaaaattattttaagattatacatttctatataattatttttacaaaatatgatttaataacataaacaaaaataaaatataaacatgtattatttatgttaattttctctttattaatattttttcttctcctccagcttattattataaaaatcttcaaatatagaaaaattcaaaacatagaacagtaaacacctgtgtcacctctaagatttaacggctgttatattgtaggaaaataaaaacttatttgctgtatgaatatatgaagtactgaaatagaataaaaacatacaaagtagtataaacacacttttatttctgtaccacattattgatattgtattgatacattgttatatttttgaagaatcacaataaactctagattggagaaatactcactcatagactcaggccctggaaactaggagagtccagtgcaatcgtttttgttatgactcgttctcttttatttttctcctttctttttaaatcttctttgtctttctatctgacagaagaataaaatttagcaaaataattattcactaaagaaatatctaaatgaatattggttacataccaaagatcgaataattgcattctataatagggaagtctgttgtctttgtggttggttggtcttgtgttatacagttcatgaatacataaataaaattcgtgtgtcttttgcaaattactcttttattgtgttccttggaaataaatcactataactaacatgtattgagtactgaatgccttttttctttttgtaatagactggagtgaatttagttctgcatggtaagaacttagtatatgtagtaagtcaattttaacttactggtaagtgacattttaatgaaacatttttaaatgggcagatctagtgttgccagataagctgaagcatgctcagttagatttgaattcagatgtacaatgaataattaccttaatataaatgtgtcctaaatattgcataggacatacttatactaaaataattactcattgttcatctgaaattcagatataagtggatgttctgtattttgctttgctaaatctctcaaccctagcagaatgtgatatgttagatgtttggtcatctagggttttgtttcatatactttttttgtctttttattttatgccagaatcatgatttagacaaaatattttgcaagttttagctacctatctgaaatgttggaagcaaaccaatcaacaaacttggcaccgtcactgaggaagagagaaaagtgaggtatattaagttactcaaccatattttttattttatttttactcattgattataattttttctctaagtataccaattatataaactcaattataagaacaaacaagtgaaacaaaacaaaataaaccaaaaaataagcacacctaaaaaacacagaatgctacaaacacactacctcatattaaatgtattgccctccagaatcagcctctgttctctgaaaaacactgacctgggtcttaggaaatcttaccccccatcctggtgttgtccttatgagctctctggcatgagcaagtatcttagtctcctaggattctggttctcatctgtcaattaaagggtttgaaagattgatatctgaggtcatttccagacctgaggttagagtagcccatgatttcagcttcaagttcctggacaataattatgtatccatagcactcatgagccctgtacttgtttaattaatctgtgtttgcttgttttttaaactgcaccatttctatgtcttcattcttctttattgaaatggatttagttttcatcttaataggtgtaatgatgttattcatgcaaagcaataattcaaaattaaatccaaaggaaatcttttagcagtattcacattaagatgctggatgtgccctttaaataaagtcagcatttctccctaatgattttgaggctcattctaaaagtttaatgccagaataaaatggtattttccttgggaagaacaattttggtggtcccattgtagagcaatctttttaagagaattgcagaaggtaaaaagaaatgtacatagatcgtgataattttaggcattaggacagtgctacataagacagatgctttctaccgtaatttataaacatacgctttaggacatgtaatttttcccatttgtattacggggtactttaagtgtagttgtaatactttagagttatttcagacaacaaaaaaacccttagagatcatctatccaactttctgtctctgtctctgtcgctctctctctctctctctctctctctctctctctctctttttaagaagaaactcagtcccagtgcactaggtgactggtacaggggaaagtaacttagggaagaaaaggaagcatcctgtaggtactttgcaggcatagctgatgttgtatcataggcactctatgggctggcccagccccagaattcctgctataaaaggattgaaagtgatagtgtggtcctgggatggaggagggagggaacttgtctgagatgtgcctgggaggtagggtggagtgggagacttgtctggaagctaaatttgcatttcaagttcattatttttgctcaggttgtctaaatgtggtaccttgatgggagagccagggaagtggggaggagctgatggaaatcacagaggggctaaatgcttcccatgccacttcttggctatgacaccttagccaagatatttttttcccaactgtacagatgataaccctgaggctaaaaagcatttctttgatttgctgaaagttacagaataatgggtaggattcaaactcaggtctgtcaagccagaaaatctatatgtgtgatgcattataccatgctgatggaataaacatgacctcaacaactttgaaaccttccttgaaaagagacacaaaccttcaggaccatacgtgattgtgtttgctacatgtagacacacatccttctgaacatagtaattcaaattaaatttcttaaaagtcattgaaaaatgtatagctagagttatgtctctatgtgcaaattaattgctagaagaaagtaaaacataattaaaattgaatataaagcctattacattaaagtaatgaattatttattttaaaatatccacattgacccagttccattggttggttttaaaatagcaacatgtttttctcctgagaaaagcgtttctgtataaatacattcattctccctcccttacaggctctttcttgactgaacaaaagtaatttatgctttttttttcttacttagaagttttcataatcaaagggagtctctaaagcatgtaataggacggtagatatgaaggttgatagatatgtttcatcagtttcaagcacataaacagttcaacccccaatatacaaatgttataaccaacagtataatttttagcaattcatgtagatttgatgccagacctggctgcaaggtagtgtggagtaaacaaagcaaaggccctggagttctgagtttgtcagatcctcagtgtcattgctaactgcttaggctttaagcatcttgccaactctaaattctactctacattcttgccaactctaactgaattcagcttctgaattcaactcaaaattaaatttctaattaggattagaaaattctaaattctttgaccggatttataaaatcaaatataaaaaacatatatatatgtttttttgagacgggctctcactctgtcacgcaggctgaaatacagtggtgtggtcatggttcactgcagcctccaactcctggattcaagtgatccttctgtctcagcctaccaagtaactgggacaacaggcaggtgccactgtgctcagctaattttttaaaatttttgtagagatggggtcatgctatgttgcccagattagtcttgaacttgctttttaagcagtcctcccacctctgtctcccaaattgctgggattacaggcatgagccaccacatctggccaaatattgtatataatacatgtttctggtagttcccagggacaatgaaagccttttattcccacagcagtggttctcacaatgtggtccctagaccaatagcatcaatatcacctgggaacttgttagaaatgcagattctcagcctccatcctaaacttgctatatcagaaatcctgaggacaaggtcagcaacttcggttttaggaaattctccaggtgattgggaactaccgttttacactatgatattaaagggcgatttcaaagaatagggtaattcccagattattatactgagagcttcacaactcaatctctgccttgactgtatcacgaagaatccttaaacagaagagagtgagccacaatggatggttgtggaagtgaacaaccaaggcaggtggtactgccatttcctgatagaacactttccaatcccgcgtctcccacctctgggtttccatcttcctgtatctattttcataatgagtgttcatctaagcattccaaataagttcatactggataattatggatgagaaataaattggcaaccagaaaaataggaaatcatccctaaacaatgcctattgataaatatctggaaatttttctgggaagcataggtatgctgtttcacaatataagacatgaaagaatgttcccagaagggtaggagtggctggactgaaattgaagtagtaatttgaggtgtcacagtggacacctcaaggtcatggcattttatttattgttgcaattataagaacaataaaactgcaacaggcagcagggtccatgcagtttcaccagccttccacacgataccgttccccctcatcagcacttctgatttccagaggctcgaatccactaagcagcctcagcaagcacacacattaatatatttgcccaagacagaacagtttttgagctggcagttgttgataaagacatgtcacccctggttttgttctttactgaaaggcctccgaataggaatggtgaaattctttttatcacctccacatgggttgtcttcttggcacaaatgaagagaccggagcctgcaatcattcctcaactcctaaaacaaaggaaggtggattccattattctaagggccctggggattggacatcttcagaagcattcaagaaataaggaagctgcatgttaaaaggcctcagtgctgattaaaagtaggaacaaagctaggtgctcttgcatttatcacatgtattaattgtactgctatctttggcttgcagaataggatgttataaagaatgcagtgaccattttggcatgttgaaaatcccattattcatatgattaagaaacaaaagtgaagtcgccaagcactgggttatgcccatctaaagatttgttgatggaatgaaatttatcttttattcatactccaacaacttctgaataataatttctagtgctgctcttcggtgcgtttctggtggttctgagctttattatgatcgtttccatcctaagatatacttctctttttagtatttttataaaatttgataaaaagaaaccagtggaagtgatcatgtcacctcttgtttataatgcttaagtggagttttctttgtatagtcagcaaaggatggataatctcactactgcttgttcctgcaacctcagtgcatgctgttcaccccttgccctctgagttctgaactgactaccctcctctgagatgctcaaaggccactgatatggtttggccatgtccccacccaaatctcatcttgaattttagctcccataattctcacatattgtaggagggacccagtcggacataattgaatcctgggggtggtttccatcatactattcttgtggtagtgaataagtctcacgagatctgatggttttataagattaaacccctttttgcgtagctctcattttctcttatctgccaccaagtaatatgtgccttttgccttctgtcatggttgtgaagcctccccagccatgtggaattgtgagtccattaaatctctttttctttataaattacccagtcttgggtatgtctctatcagcagcatgaaaatgggctaatacagccccaagctcctttccactcatcattttgcacatgttgattagtcaccagggatagtctttcactttgcctgggaaatcccactcatcttttttttttttttttttttttttgagagggagtgtcactctgttgcccaggctggggtgcaatgacaccatctcagctcactgcaacctccacctcccaggttcaagcaattcttgtgcctcagtctcccaaatagcagggactacaggtgcacactaccatgcctggctaatttttgtatttttaatagagacagggtttcaccatgttggccaggctagtctcaaactcctgacctcaagtgatatgcccaccttggcctcccaaagtgctgggattacaggcatgagccaccatgccaggccccacttacccttcttctcacaactcttacaaatctcattctggagagcctgcctctggctcccatgctagatcacgaccccagtcatatgctttcaaggcatcttagagttttgccttagagtaattatttgattaatgcctgtctcccaacatagaggccataattttttcatcattttatccctagcacttagtagagtgccagcctggcatattgtgggcaataatagccatcaaatgttttgagcagggaataatatggttggatatgtcttagaaaaataacccttgtaagtttggaggtcaaattggggagtggaacgattaataatagagacttcttatagggaactattgcagttttccacgaaggaaaaagaaaaacaacttaaaaaaactacctaaactatcaattttatcatccattcacccatttgctgaacatttactgagtgcctacaatgtacatgtcagatactgggctgggtgctgagacaataaaggactctatttggaaaatgaaaggaaggggatagattttaaaggggtctaggggtagaatcaataggacccactaaacaatttgagatgtaaaagacgggcttcaaaaggaatctaagatttcttgctcaatgaccaaatagagggtgattctattaacccctttttagaacttcaggaagagtagcaagtcagaacaaaaggtggagagctcaagttgaacatgtggagtttgagatgctcatcagatttccagatgaatcaactggttcaatcacagtttttgaaatgaagcatcattgttcagtgcaaatcttccaggggaattcaaatgttagatacagagaagtagagactgagaagagagcaaggcccatttaaaaatataaaagtttagttttaaaaatgctgtctttttgacctttacaatgtgcatattttgaatgagagtaagcaaaaacaattgatttttttgtaaagaaatgctgaagaaatacattcatcaatactgtagtttgaatataaagaaaatcagaatatttataaataggaatataaataatatagcactcttattggatagcaatggattaaatgggtatttgctactctactgcttttttttgagctgattataattatatgaaatatattttagggcatgcaattataactgtatgggcatacctaataaataatatgtctatatcgcataaagtataaattataaatatatatgaactatataaaaatatactttagtcacttaaaacacataatagaacattttattctgttttttcatctttttttctgagtacgtaactcttgcacttgtccctttcaggcaatgcttaagaatgtatgtaaccaacaaatacaatgataaatgtcttttgcagcaagcttcaaaatctcaagagatgtaggggcagcataaaactctaaccagataaatccatggtatattgtctgagccaaatgctttctctaaaatgagagagattcaaatcagtgacaagaaggagcatgtggggcttaagctgactgtaggaggacacaggtgtgcttcagcaccacaaatgaacgcagaattatctaagaacaccttgccttgccagctatttaatatcacatgaaacgggccaagaatgcagtgatattgaaacaccaatgccagtattgtttttcctgtgtctattccagcaattgcttctttgttattgttgttcaatgaggtgttatttcaatactgaagtagaattcattaaagtaaggtttgagtggagatattttcactggttgattggttaaactgaggtttctttttgcctctctagttatccagtgtattgacagccatattttaacaagaaaaaaattttgacttcacacattcactcagtaaataactacttagaaggttcttgagccgggcacggtggctcatgcctgttatcccagcactttgggaggccaaggcaggtggatcatgaggtcaggagatcgagaccatcctggctaacacggtgaaactctgtctctactaaaaaatacaaaaaattagccaggcatggtggcaggcgcctgtagtcccagctacttgggagactgaggcaggagaatggcgtgaacccgggaggcggagcttgaagtgagccaagatcgtgccactgcactccagcctgggcgacagagcgagactccatctcaaaaaacaaagaaggtacttgatggacaacactctctagacttaggtagagcgataaagtgatgaccaacttacagctgaaggggaattccacatgttgggcatagagaagagtaggtaaaggtatagggatgacagagaccatggttgctcagataatgacaaacagctgagcatggctgggtgcatgaactaaaatattgcttgaatgtggggaagtaggatggtgggttgcataactggtaaggagcaaaccgtgactagccttaaatgtcaatctacagagttaagatttccaaattcattaggacatgtatcctacagtgtgcaaggatttttactaaaggaatgacatggccagatttgccatttggaaagctgaccccggccatcgtgtggaggatagtttggatggtgaggcaaggaatcagaagagaaggaagtgtggccaaggaagagactcttgtagcaattcaaatgagaatactgaacactgaaccaaggacaagactttgaatgtggaagcaggggaaccacataagacaaatctcaaacttggatgctggggatgaaggataagggaaaatcccaggtcaattgggttgatggagtgtatattggtttgctaaggcttctgtaacaaagtgcacaaattgagcagcttaaacaatagaaacaatagaaatgtactgcctcacagtactggaggctggcagtctaaactcaaggtatcggcagggttccttctttttgagggctgtgagaatagagtcggttccatcactttctcctgacttctggcagtttgttgacagtctttcatatcccttcgttctagaagcatcagcccaatctcctgccttcatcttcactgtgagttctccctgtgtgcacatctgtatccaaatttctccttttctagagatgccgttcatattggactagaggcccaccttactgtatcatgacttcatcataagtaattacatcagtggtgagaccctatttgcaaatcaggtcacattctgaggtactgtggtttaggtcttcaaggcagggatttttagagatacaattcaatccacaacagggtactactcgtggaaacagagaatacacaaagataaaccagtgtttgtgggaggaaattattaatgcatcattggttatgctgagtttgaggtactaagggttcatgcaaatagcaaatatttctgggactggacttaaacaattctagaacatagaaaccagcatctctcaaaaaagagaggccttgggtacactgcctactataatctcttttatttgtcttttttgaatttaaaaagtatttaaattatattagcagaggaacagaaatttagatattgcctggaaattttaaaaatcagaaggaaagggccaagtagaaaaaataggagactcttcccagatgaatttcaacagcttggtattcgtgtgatgagttgtgattaacaggcaagcaggccaaacgtggttaatagagctgggtctttgagttttctttagaaaatgttgattctataatataagtgacacatctccatacgccccaaagcagcatctggtttgatattgaggtttcacctaacagttttcttcagaaaactggaacatttggccaatttcttaatatattaattttaatagattttctgtttctaatgaaaacattcttgtgaaaacatttgtttttcatatgcataactccttattgcccaatatacataggaccttatatatggtagatgctaaatacatccagttgctggatgactgttgtgtaaatgtttgggacacaacctttgaaaagaatctcaatagcccataactccatgtagcatacaggcgctcatataatgctctcccttccccactacaccacatgggaatgttatggttgctaagaagcacaaatgatgccaccaaataagtctaacttgggtgccaagtctgttcttccagtggtatgggcactatctttaggcagaggcatccagtaacagttggaaagaaacccgtgtgactgcgacctgtacaatgcatgcaggtgacagtcttctctgtgcctctaaatgtgacaggcatcttggggttatacaaaaaaaagtatatcagatagtgccttctatggagacagtcaaaagctaagattgttggagtcagatcgacatcttcatatcccagctcagccagctctcgggctgtgtgaccctgagtgagtcaggagctttctcaggttcaacttctttataatgtggaaattgtaataacattaccttttagggttattgtgagcacaatgattgtatagagattaaggcacataaagaagttcacaatagtagatatggttgtcaaaattatcatcataattataccagagacctgaggttcctgtgtacttcatgaatctattaagaaaccattccagaaagtaggaccagtgggagatgaccataatagccatcgatattgcaaatggagaggggcaaatatgggtgcttctgtgatctgggaggggccttggaaggaggtaaggcttcagtggccttcaaagatagagtcttaaaagaagattgaaaggacagaataaaaatgtactgtctgaactccactatttcaaacacttgactgatctttgacttctctgaaacctgttccttaacacaatttctgaagaaggattggttctcacaatatttactattgtaagcttcatcaaacagccaagtgatttctttaaaaataggggttttgacctttgcctttccctggctgggaacttaatcatcattctttggccataataggccaactctatttgtgggcctaggacttgatattggagatcacgtgacatccttgtccacgtcctacgcagcacaacttgtcaaaccagagcagatggctcttccgagtctaccccactggcagagggtgaggacgtgggaaatgaagaggtcctttacagcctgggcttctgggttgctatgcctgtcaagcagcaaattatgataaaaagggccatgcaaaatttaacatttttttaatctcttgagaactgactacaatgtttactcttttctggagcttcccggaatgttttatataaaacttttgctactaaaatcctttggagttttagaatgatgatgggaagtatagcagagtttaagttttggtttgagtccactaaaccaggttcaaatgtatcagttgtgtgtccctgagcatgttacttaacttttctaagtgtcagtttcctcatctgttcaagaggaatggataataaggccctactcgtaagattatagtgaatattaaggatacagttgtatactgcaaaaggcttttgatacatgatagaataggccctcaataaactctagttattgttattttaatggtgccacacacaggtgatcaaggtttcagtgccacaaccattgaaagcttggagtcccaatgccagtaatgtcatttttaaattttcaagtcatgacagcagaatggtgagatgttctgctacagagaatagaaacttttagaaatggtttccttccaagcaatgaggtaaacctcctcttaaaaaaaaaaaaaatcttagttttccattgttacaatttcaagcagtggcttaaaacagtaagcacttgcaaattatgtggctaaacacagtaggcactttttggcatgtgaatctatgggactatagttcaggccaaatggctctgctagcctcagctgtgtctggaagtcagctggtcattgactgactaaggctaggtctggccaggccaactatatttgtttcacctgtcttttatccgtttccctgggacaagccagcctgcctggacatgttcttctcatggtagaggtataagatagagcaagtccccaaagcaatcacccaaatgctttgctagactgcttacatcacatctgctagcatctcattggccaaagcaagtcacatggctgagcacagcatcaaggggcaggggaggtgactctcacactgtggggaagtacagtaaagtccctgagggaaaggatgtggatacagagtcggggaagaagagggagcatcatgtgatctacctcagctttagagtaaccgatagccaaggggccatcacctcacagcgtctagactctgggaaacagacttttgccctagtattgattctttgcctggagtcgtatcatttgctttagtacctggctatggcgttaataataatagcacagcagaaaggttcagtgattcttgtatagctacagactgagctttataaaataacctggatgcttattttaagaatatagactctgacagtagcaagaatttttctcaattgttttgaaaaggttctcacctattgaacagctaggatgaggagggttgattagaattttcagtgcatgctctgaattatgccatggagacatgtgcaagactaatttgtttgtagcaacagagaagccaatcatgattagatttcctggcatgttattcacctgcgaggagagtcagacttgtgtccaagaatctcaatgtgaatttggtcataactacatccatacagtgctggagggtttgataagctctaggtgtccaagcatgctcttctagaacttaactgacttctgcatgcacgccagccttcctagtgtaacttagggcagagctatgttttacttagttgctattgtctttgtattttatttaattattattaggtaaataacagctatctggaagtgaaaaagtcaaccatgatggctgatttttagagaaaatatatcttgcttttaccctctgacttctagcccttcagttccttggggaaatacttgaactcactgagcagcggtggggtcacagtctgggcttgtatgccctcatttccaggccgcattcctcagaggggccctgagtactttgggagctgatagagtttggctgtcatttgaaaatgttttcctgctaaatgttttcatttagaagctaatttatactctgctttcaagtaagcttaactccatttcacatccctgacatgtagcacacactgcagtgactgggatggaagtagacaattcaatcaaaggatgatttctccgtggaggaaatgaatattatttgttcatcttgcaattcagaattctgagaaaattatgatgtttggcaaaggcactggcaagacagaaagacaaataaattgcatggtgtgagaacagccttcttaatatgaaggtttccttaaaacagtgggtattggctgcaggcaaaatattaagctgcaaatcactggtttgcaacttcttgatcatcggttgtaatcccaagaacatatttaatttcatatttagtcctaatttctttttgttccgtaatgatatttctgtcactcaaaataagccatctgttggcagcagcccacaggaaacagatactgcacactcagtaatcttggagtgagtctgttgcattgtgagaatgaaaaacgggcctcttcagaatcatagggtcacctttaaaattcctaatttttctttttgtcttctctttggccatatgtagtagtggaaataaatcttgtttcattgtcttttctgagatgtttgtgaccagaggtcagtgctttggactcgaggattagagagtttccagctctgcttggagatgcatttcccatttttttaaccctctatttaatcaatacctagctttgccatattttcaagaaaaaatatacctggaagtattgaccagaaatcaagcctatggcaaaagaatgccttccatttgaaggttatgagatggagggcaggatgtaagacagggagcaccatgatgtgaggagtgggcagaatttgataaattgacattatctccatctagtctttgaccacgcgtatttgaacagaattccaaatggaaagaagagacagctgggcacgatggctcatgcctgtcatcccagcactttgggaggacaaggtggatcacctgaggtcaggagttcaagaccagcccgaccaacatggtgaaaccccgtctaaaaatacaaaattagccaagcgtggtgatgcatgcctgcaatctcagctacttgggaggctgaggcaggagaattgcttgaacctgggaagcggaggttgcagtgaaccgagattgcaccattgcactccagcctgggcaacaagagcaaaactccatctcaaaaaaaagagactctgaccatgacttcacatgatagctaacacttcttgaacgtctgcagagactgtgctaaatgactgtaaatggattttctcctttattcctctcaacaaccccagcaagtttctcataatattatttgcattgtaaggatgagaaaacagtctcagagctccatagctattaagtgatagaatcttgatgtgacagccagggcagcttgatttcaagatatctcaatactgaagttaaaacttggaatgggttaaaaatgaagttgttctatccatcatgcctgcagaaaacctcctaagaataaagaaaataattcagattcacataaaagaaaatgttagagatattgaaatggacactcaaagcacatcaatgcaaaggtgagggagacagaggagcttttgatcttcccttttgttccctcatgttttgaaacatgcttccttttgatgccagctctttagaggttgctgcactcaagctttagatgactcttctatctcccagagcaattaaaaggtaatgtcactattttaccacgtgacgcttgacatctgattcatatatcactcagcctgaaggcatatttttcatactcacttgggtgcatgtcaagcagtgaattgatctcttttaggattcaaaaggaatccccttttccaaaggagattctggtgagtgaacaaaatgaatgtccctattacttcccatctcctttaattagcaagccagagagctaacaattatctcacctgtcagctctcttgacagcttgctgttgaatcggaaccaaagagagatcacctgccccaatttcaaaccccagcaattgatatcaaagtctccaccacccaaggtctacttaaagcccattagtgtggccttcactatatttcagtttcagttacctcaaaccaatatctcagattattcctccttccatcatggatattctgactcataaatgtcagtacatggtggaggttgcctcatctcacaaatttccactgtcaaaatattctcagcagtactagacagatggaaccaatccagggagcaaaacaaatgctaccccagcttttggcgcactccaaatgtagcggtactagctgttcttatctcataatatgcctatcgccatcattttttcccctaacaatctgtccatgatgacaagttctattccatgttcttgatgagggatcatgtctctaagccatatgttgtaactggaagactagcccagttgttgcctttacgtttttaaataagtggaataataccgctcatattaccttccattatcttagtacttatctcagtctggttctgtatcctcatcatttccctgactgagaaaactaaagaataatgtgtaatgtgatcgcaaatttgtaagatggaataaagcatttagtcgttctcctctgccaaattttttgattcccattttcagaggatgatttgtctcctgccataagtggacatggtgccactgagcatgtagcaggaccgagcagctggccaagacagatggattcctgtgttgatctagtgaagtttcacctttgtaaatcttccttgctttctcatgcctattaagcgatcttcatctcagaacagcctctttgccctggttttaccctctctagtaattgtgtctcagtgaactgtggttttagtacaagtaccctatgaaagatgtttgcaactctggtcatagttgggaagtcaccacatactatgctttggattcatccaaataacccttctctcattgccatctatctatatccatttacttatccatccctatccccctcccttcctccatccattcatccatccaccatccatctgtccacctatctggtcatttaatatttcttttggaaacagttttggaacttagctttaccttgtgatctgattatatgaaattaatctagccttttctgatttatctaggaaagaccttctttttcagagttctaattaagggtttgaaatgccacagttaaaacatagtgattttaaaacatatcataaattctctaacactcctccctttgagaggaggagtctgtgttccctccccttgaatcggggccaaacttagagatgtgcttttttttgttttgttttgttttttgagatggaatctcactctgtcaccccaggctggagtgcagtggcgcactctcggctcactgcaacctccaccccaagggttcaagcgattcttctgcctcagcttcccgagtacctgggatttcaggcacctgccaccacgcctggctaatttttgtatttttagtagagatggggttttatcatcttggccaggctggtcctgaactcctgaccttgtgatccacccaccttggcctcccaaagtgctgggattacaggtgtgagccactgcacccggccagtgatgtgctttttactaatagaattaagcagaagtagggctatgaaattccaagctaggtcagtaaaggccatactatccttggttctcatgagttaccttccttgggggaagtcagccaccatgtaaaacgttatactactctgagaccaccatgcaggagaagagatacatagactctctgaccaactgtccagctgagctcccagccaatagccagcatcaactctcagtccgggatgtgagccatcttggacatccagatcagtcaagcctcaaaggatttcagctccagctgacttcttacttcatcctcatgagaaaccccaggcaaaaactgcccagtcaagcccttcagactacaactgggccctgaatccatcatcctcaaaattgtaagatagtaagatagttgttgtaactgctaagttttgggttaatttgttatgcagcaataatagcagaaataaaaacaatatatgactgagttacttagcacttcaagggaaagcctaccattttgttttatagaaatgggctaattcttcttctagttttcacctttctgttttaaactatagcttgtcttgcaagctttgctgctagagattgaggtagaaatggatctagaaactatggctgtatgtcaatttcatttcctcaaaggatcatatattttatgcagatatggagagaatatctaagctgcaagagtttggaggtgaatagaagaaaaatagaagattttgtaggttatccacatcaatctatatactcctagtttaggttctcatattgtgttatataccaaatgtatacatctcttgatgactggatactttgtgaggccttctgttagtctttggataatgtataattcaacacagacagaggttttattttgacccttaagtctcacctccagggagggaagagaagccttcacattgctgtcacaattctccagatggtcctaaaaggagctcacttttcttgtctgccccagtcccagtcgtcatatcctataatcgaagcagcttcctcttgcatcttcctaaattaccacttagcatattccctgactgtgggcatattcagtcagggaacatgttaactcaaaccaaatattgtctgtgcattttctatctatgtgcatatcaaccttttttttttcagcgctatctgaacattaagcattaagtttgcgacattgctgcttcattccaaatgcgacatatataccctaagaaaaaggacattttcttatataagcacaagagcagtatcatactcaagaaacttggcattaatacagtaatatatctaacattcagtttatattcagatttccccagttgacccaatgatgttttctggttttgtttttgttaatagagtatctttattaatacagtatctaatgcatcacatttacttgtcagatctctttatcatcctgtaatctagaaaagtttctccatctattttggagtggtgtttggtaaaattaacatttttagagaattcatacccactgttttattatttaaaataagaaatatttaaataaatatttaaaataagaaatatttaaataaatatttaaaataagaaatatttaaataaatatttaaaataagaaatatttattattcagataaaaatgtgtcttattatttcttcctgattaaattcagattatgaatttggggtaggaatatttatagatgatattattcctttccagtatatcccatcaggagatacttatcatcagttagtcccattatttgtaattaaaagtttgattccgttaccaggatggtgtcctccatattttttattgtatcacttttttattccatattttttcattttaatagtttatgagcaatcaagaagtgacactctgacactgtgcaaatattcagttccccaaccagttttcatactatggttttcacatccactgatgagtctcacctgagtcaaccattatattgatggctgcaaactgatgaccttctaatcctgttccctgccggggtagcacaacaggcactgggctaaatgattgtacatggattttctcctttattcctctcaacaaccccagcaatttctcataatattatttgcattgtaaggatgagaaaacagtctcagagctccatagctattaaatatcagaatcttgatgtgacagccagggcagcttgatttcaaggtatctcaatactgaagtgaaaatttggaatgggttaaaaatgaagctgttttatccagcgtgcctgcagaaaacctcttaagaataaagaaaataattcagattcacttaaaagaaagtgttagagatactgaaatgtcctatgtccccattccatgtgggtgtagggaaggagataggcaatgtgaagccagggagggctgtggaggttcagctgctccatttataggctttcaacagatcgccctgttttcagccctaagccttacccctttgcttagggctactgggtatctccacttcagaatcctctacagagttccctggcaacagtcaacacactctgactacttctcagcaggctctcctatttcagttcttcttccttactatctgttatctctcatttaatatttaaaaaaaaaaaaaaactacatctcttgtcttttgtcacctcgtttttcattctctttgtgggcttttatttatttatttatcatattattattttaccataactttagtggactttcagaagggaccgaagagaaaaaacatgtactaaaacatgtgctcacgttttgtgtatgttggtatttttattcttcagttttacagatgcgtgccttacatttctactcacatcatgttgtttcatgtagcagaatattttcaggctgggcgcggtggctcacgcctgtaatctcaacactttgggaggccaaggcgggtgcatcaggagttagagaccagcctgggcaacatggcggaaccccgtctctacaaaaaataaaaacttagccggatgtgatggtgtgggcctgtggtcccagctgctttggaggctgaggcaggaggattagttgagcctgaggaggtcaaggctgcagtgagcggaactagcatccctgcactccagcctggcagacagagtgagaccctgcctcaaaaaaaaaaaaaaaaaagaatattttatttctgtgtaaacagattattattccttttttatttatgataattatataagcacttattactttcatataaggagaaaatcttcttcaaatttttatatgcatacatttttttcttcaaggaaatctatgattaagcctcttttataaaaaggtatgctttatgaattaattagagctagggaagttaggtaagtatatggagtaggaacacatgttttcctcccctcctcataggtttctagaagttcttctcttttttggaagacagaggaattatcactgccttgccagaagtagcatctgggcctttggtgtattcttcagcttgtttattgacagcttgtaaacgtgcatagatgttcacagtctttctttagttttcttgaccattctgaaatctttaaatgatcttttcctgtccatggcccttttagtcatcaccaaactagatctggtcctcagagaatcctgatttcttgaaaatctctcattattccgcaatactccaatctgctattaagtgaatactagaaacaaagtggtaggcactcaggatgttaggttttggggtgtttttgtttttaatgctgtatgtgaaggtgtgcatggcagttgataaggatgcctactctgtttcccttggcccagctgagtttacctgcagccttcatggacagttcccagataacacagacagcttccatgtcaaaaacctccatctcccactcctttcctggggacttctacagtgccatggtagttttactcagttctggtgaatagcagcctagaagtgacaagaatttaatgcctccaagggcatcccttaatcaatatgggagaagattcactgaataaataatctggtatctcagtccctcattggcactgttttaagaatgtcctatatgagtcctcagaaaaaatctgagcctcagttgcctacatgggttaccctctcgttaaaactcctcttattggatttctcccttctcagttgcctttcctatcacctcccctgttcttcctgggatcatcccaaataaactaactgaatccaagtctttgtctcagggtctgcttttgagggaactcaaactaagacaattacaaagactaaaaatttccagagaaagtgtaattatatgttgttggaaatttactctgctgaggggaagtgcacaggaaattattctttttagatctattaacaggcaactggtaaatttatgttataaataacatggtaatttactcaaaaatttctggaacccctactaggtgccaggctttctgctagggactgagaacacacgagtcgacaaaataaacataacccatccctctccatcatagagcttagattctaatggtgatatggacaaatcatgtcaattataattcagattggggcatgctatgctagaggaagtcccattactgcaggaatacatagggtcagaaagactgtgttcacccctgtttctcaacatctagcacaaaacctggcatatgatgggtatttgtttgtttatttgttcgagatagagtctcactctgtcacccaggctggaatgcagtggtggtgatagctcactgcaacctctgcctctggggcttgagcgatctcctacctcagcctcccaagtagctgggactacaggcacacaccaccatgcccagctaatttttgtaatttttagtagagttggggttccaccatgttgcccaggccagtcctgaactcctaagatcaagcgatccacctgcctcagcctcccaaaattccaggattacaggcatgctgggcacattgtggacgtgcccggccaccttgggtattttggaagtatttattgagtaaaagaagcatattcaagaatgagtttatattcaaagaattgcaaaaaaagatcaatgtcctacagaataaagcagatagaggcacggacaagaatcaggacttgtaggccgttgaatactgtttaggcctggagacttcatctgaagagttacagcagacaagaagcagagaaattttaggcattaggacagattcagtttagcagtttcacatggccactctgcagacactaggaagaatggatcaaagccagcaaaacagggatcagaaaaataagggagagggctatgctgtaatccacatgagaaataatggcaagaatggcaatggagatgtggaggcatggctggactggaaagagatgtaggagttagaatagatgaggcttagtacttatttggtatgagaagtggcatagagagagacagtgctaatattgcccacagttctgatcagcacagctaaatctggggctataggaggaagagtaaatctaatggtgaaggtgaagagagaggaatttgctccggtatagtgcttaaagaaggaaggcagttttggcagagttgttttgtattacatttctctctgcccacaaaggactctttatttatcaaaaagataaatctaaaatatgtcacttgaatatagctagataatttatagccttgtaaatctgaatggacttcaccttagataaaaacttggtatgttaacttttccatcaaataagtttcatatttttggctttagaacctatacatcatggtagtcctatttggccaaaaaaaaaaaaaaagaaatatcaaattatataatattcattttcttaaacaaaacatggttatataacttgtatgcttaggactattgtttgttggaatgatttaatgaactagattatggccctttaggtgcagtttattatttttaaatttcttcttttggaaatgtgaggaagggtaggaaggttaaatggaactgaagtagcaagctgggccatttaaggagggcatgagtttaaattctgaacgctgaataaaaatgtcctaaaataccttcatttggaaggaaatgactttagctgtttagccttggagggaataaacagctacatgcatactaatcttctgaaccctgtgctatgttcatagccttatcttttattcatttcaaaccatacaaatctttaagggagagaaacccctgcttcttgcagcattgcaactaaaatgcagatgctacatttctatcagtggaatttgagttattcttgattttataccttaggatatagcaaatctctaaagacagagtgtaaaggggtatgagtgtgtctattaatgggggaagaaggagtgtgtgaaggggatcccagtgggtgggtgaggagggagtgagaggcggccaggggtggaagcttacacaagagccaactgcagccctgtggtagagaagccctcctattctctgatatctatttcccaatcagaataatgaccaattccagtccctcttttggaatagggatgtggagagtcataatgggatttgaaagctgtcctgcttgtagactatcatttgaacttgacattttcacttgagtgccttcttcttgcaactagtttacggttttatcaatacagtttaatacacttttaaagccatacttctggcatgatctagcattttccaggaaaataaaagaggcacatactgtaactgttgatcatggggagtgatggatgggttctgccctctgctagtgcaaaacatatcactgaaagtctagaggaacaggtaaggggttgatagttgggacaatgaattttgaaagatactctgagcttatctcatttatctaaaaaatgacattagaaataaccagcacaacacggtgaaaccccatctctactaaaatacaaaaaattagctaggcacctgtagtcccagctactcgggaggctgaggcaggagaattgcttgaacctggaaggcggaggttgcagtgagccaagattgcgccactgcactccagcctgggtgacagactgagactccatctcaaaaaaaaaaaaaaaaaaaaaaaaaaggaaaagaaaagaaaaggaaagaaccataaattaactgggattgaaagtgtgtgtgacatttatatcatggcataatctccaaatgaagaacatgtttatttgatttggggatagcttactcaggattcgttgcctgatctttatttctctcaggtcctaaatgggactctttggaactcatgcattcctgacttattcagacctgcttctgaaccatgcttggctcagtaaagcagagaggcttagagaaggaaaattaaaatgggtcatatgcatctgtgtcctctttgaggcatgtcacaaaaacagccattctgggaacactgtaaacagttttacccatctgtctagtttaatctatttggggattaaaccttctggcttctcagagtacagggttgtgtgagaggctcgttcatttatgatatgtgtttctggaatgctggttacaccaatataaatgatggatttagggcactgtgtttacttaaagaatcatggatctcttgatttatactaagacatctggttttttttttcccaaaatctttgcttaaactgaagctgtttatccactgataaaataacctctgtgtattcatggtgcccagttgttggtaactagcaattatatactactttctaaaatagttttggttaaatggcatgcatgatttgtagtaatgaagttcttcaatgataaaaatattggaagagacccatttgaattttagctcttatatgttacaatgtacttcacactggctgtgtgcttagtattcatgttttagaaaataagaaaagcatttgggagatattaccaaaaagaatcactgcctctgtttctgtttatcctgtgattacagttttcttattaagaacaaatgtgggtataaactcaatacattgtgggattcctctctggtcaatggaccctcactgtgttctgacttctctctctttcttgattgatggtaatttgctacagtgaacttgaatccagacttcagtgtaagattgatgtgtgttaggaaaaagggaagaactcttgcccttagaatcagtttccaactttatttactgtttggggctttttccatgaatttcaattttacctatctaggacccatattagcttgaccattgcaagtagggagggctccaatcagtcatacagccatggattgatgagtcatacaatcataattaaagaggaattggcagcaacataaaattcatatgcaaataattgtgctgattcatcattgcagtaaaattcacttctctgcatttcttcattcaaaaagccacattcaacggggcactccattttaagtaggcaaatttggagattccttaaaaaaaaaaaaaaaatgttttccttaggaacaattctgtttagtaaaatttagcccaggctataaaatacaggctaggacaagatacgggttaggacctctactttctcttcattctttgattaggtagttttacagttcctgattctattacttagatataacatgtagaagaatatctacacttcagatgcagagagagaaaaaaataaaaggggtaccccacaagaagaaacagcaaacacacacaccaaagacaagaaatgtaagcataatcttttgttttttcccctgacacacagatttagcaagcttaccattggccccttgggtcatccccaaaccagagctttaaaaatctgtggttacctgagaccctagagctaagtcagacattctaggacctaagccaaagggccaatagaaactttagcccaagtaatggtcacacatgtttactatagagagcaaactgaattggtctcagagtttatctttctgaactcatgatggaacacagagagtacagaagggggaattgggcttaatttggtgcagctgttagaatatcccctggtctctgagctatttgtttgtcttactgaactccagcagattaccattgtcgggcaatctggcacattttgctcctttgttcatccccagccatgttatgtaggagtcatcaacttccccctcataaagacgaccactcagaaagcactttcaactgggacaaactcacatagtaataatctaatgtgtggctactatatgttaggcactgtaatacgctttactcaaatctcaatcaatctctacccaattctatgtggtaagcataactaagatataaaaagatgacaagagtcagaaatcaggtaagacactcagggtttctctactatcgtgtcaatggaaattcattagatcctggcccaaagcaatcaagcccatcttgggctgcccgtgtactttggctctagccagactatgagcacttcaccaccactaaagacctcagtggccattccattctgattatcctgctgacttcttgcctactgtgctctcttcaggaccactctgccccagctgccaaactttcaatctgtggcctgagccaccccagcaccttccctcctgcactgaaatcctcaggcatttctattaggttgttgcaaaagtaatagcgggttttgctattactttcaatggcaaaaaacacaattacttttgcaccaacctaatgctttgtcccacactggcctgcagagaacagcctctaaaacacttgccaaaggtgctggggttcccccaacccacatcttggtgaaggggctcattttggctacattgaaacgtggtttcatatgtttcatatgaaaccagtgtgttattatttttccccctttcccttatcttttagtggcctcaccagaatttgaaaagttatattcctttgataacataactcttcctcccattggctgagctcaagaagtgttggttaggaaagaaaacttcaggcagcccactgaattctaactctgtgtctgaaattctttcctacattaaaaatgttactgaagccctgatagtatcatttctttgatatgtgtatatgtatttcttataaagaaaagattagtttaagtgactatcaaaattaaacattttgttgaattattgcaaaactctgactgaaccatttagttatgctactaggatcacattttcctttttgtataatgcattaaagattctcactttgggaggccgagacgggcggatcacgaggtcaggagatcgagaccatcctagctaacatggtgaaaccccgtctctactaaaaatacaaaaattagctgggcatggtggcgcacgcctgtagtcccagctacacgggaggctgaggcaggagaatggcgtgaacccgggaggtggagcttgcagtgagtcgagatcgcgccactgcactccagcctgggcgacagagcgaaactccgtctcaaaaaaaaaaaaaaaaaaaaaaaaaagattctcaggctgactatcacatgtgtggatgaaggtaagagcctagaacaattagataacaagagtgaataaaatattaaataaagaatagtcatgattaaatcaatctctggagtaggatcactaaatgcatcaaacaaatgttagttgagtaaaatagaatcattgttatttttgagtttaaatattgaaatcgcaatcttatttaagaccaaagtaggtttacatttgctccatctcctcacccatttcccatattcttgccaccccataaaatgagaacttctgtcaacccttggaagaattgaggacaaagagctgaattctctccattgttctctgacttctctcatgggaagagagatgacgggttgagtggcaagagcctgacaaccattggtccatgttcttctgctgagtaaaatcagtgcattaagcatcactgcgcatgtacagtcactcttcttgggctcacagtggtcaataaggggtgaggagatggaattttctatgaagttctctgcctgtctgtcctgaaaacccaattctcaacaatctataggtccaagttataaacatggagtcaatggatagaaagacttctgaccttgtgttcaagctacattttgcaatccagtcttccaaattagaaggctgatgttttcatctctgactcttgcacatatttttaattcatccatggtttggaagttagagagttatgatggtttattattctcaaactgcaatactttttatttagttcatcaaaattaaagacaccacagccataatccatgtcactttctgcctcaaatctcaagattttgaccaaaacatatggctatggtggtctcttctagtttaaaagggcaaccatgttttcctatcattttatgcctgttcgcctatttgtggctggctaaagaattgtgaaagtaagagacattgtgttggagtaaaattaggagacccaaatttgactcccatctctaccagttaactacctgaggaaatttaggtgagtttcttaatctctgtactactcaggtcactcatttgtaaaataagaagaataaaaattactttgtaaaattatagtatattatctgaatatgataagatgataaaacaattattaaaaagaaaagatgtaatgctagtgctagatgctggggggattttgccattgaaaaataacctggaaataagtcaagactgatcatgggctgagttcaatgactcatgcctataatcccagcatttgagaggctgaggtaggcaagataacttgaggtcaggagtttgagaccagcctggccaacatggttaaaacctcacctccactaaaaatacaaaattagccagtcatggtggtgtgtgcctgtaatcccagtgactcgggaggctgaggcaggagaatcacttgaatctggaaggcagaggttgcagcaggactagattgcaccactgcactccagcctgggccacagggcataacaaagtctcaaaaaaaaaaaaaaaaaaaaaaaaaaaaagactgatcatagtctttctgtataggtcaatttttttttccattcttggacacataattttgctttaggtggtctggtttatgtctaaaacagaaggggaatgggttgagtaaaggggaaagaataaactaaatgatcaaagtcaacttgtttccagatgtctagatctaaaaggccacaaaagagctcttacttaaattatttgcccaaacaaaggagaaattttaaagatcccaagaggatgtggcattaagacagacactgtgatactcttggtgtagtcagggaacatcagaagctcatacttcctgacatggaggcagtgagtattgtaagagaacgctactcaatgacatcattcatggtcttttcacagccttcacctcctttgcctcaatatccttattcttcaaagtgttggtaaattgggcttgctgtcattacgcattttattggaataagcatgaattatgcaattagctttctcgctttccagcagcatatgcaaagtgaaccagaaagataagagaaaatcttttcctcaggatctgtagattagttcagcttttggaattttgctggcaatttgtagtgatgttgtcattttgactactcaacagctaagtttcacattttgggctgaatctggctgggtagggtggttacttgctttgatgttcttggagattctctatgttgcttggtactactaggctaaaatgtaatactgttctgtctgtgctacctaaaaccagtatgtttggggcctcatctgccttcagtagggtattttcctttatccttcgtgaaaatcaatttttttttaaatgaatgaatgagagagatgaaatgagaaggagaaaaatggttagggtagattttttaagcagtgcctttggcttttgttattttatgctaagttatttatcagtaattatcattagacaagctatactggggtgaaaagctgctgctttttcttccgtagccatgtgaaccctggggcgtgccgagggaattaaaataagaacagagcacactgctgttttatctcagctactgcaacatctctgcttgacaccctgtgttgaacaagagactatttagtagatctcaacaattatgcatgtactttcctggcagagaactctttgctgctttgtttgtcaagattatgttgaatcagcataaaaatcaggcctgacttatttctggaaggaagcagcctctctcgtaccattggaaacaatatgatcataataaagttttgcatatagaacatttcttttgagtgtagacaacaacttattcttgtaaagaatttaacatttaagtctcatatttccatacttatttctattgggactgctgcctactgccccacccccatcccccaccagccagccttagtttttggtatatttctagctctgtccatcttggagcagctacgtgaggattttacagctgtctttgtttctgatggaatcctaacccttttgtgatgtggggccttcatataagtatgtgatgtggaaaatgaagcccatgtgtgaatacaaagttaattagtatgaaaagtcccattttccaccacatttcttgccagcagctatgattaggtgcacctaagctttccaggtctcctaatattttttaactaaatccaagcatagagattccaaaatatcccattctgtgataatatagatgcatgacagaaagggaatgaatattggaaggtaatgtttgtgtgtgtgtgttacaggcttgttggagttcatcactttactttctgtacataaaggtgatttgttctaaatgttttaagcagcagcagcagcaaactttctgaagtctttaatcattgggatgattacttagggcatgctttaatgaaggaccactttaaaaagtagctccagagtaaggctgaagtccaattgacattttctctatgtgttatctaatggaaatgatctccatggcagagatgaaaataagacctttgaattgtgttgagtaaaataagatgggtcagatggatttgggcaatttggggatgatccttagaaaggagatagttgcatctggatggagctagggagacccagtgacagagggagcctgggatcatcttatggtgcatgtcatgtttgtgtagaaacgtacagtttgagcagaatacaaagttatataggtctaagaaattacaaaagaaaaccaacagcttcccctttattcctgatgctatggctggcagacaaatggggtcttcgaaatatgtgtgtgcatgcagccatgcacaaatgcttattcgctgatgaggatgcagtgttgatgcccttaggaacagcatcacttgtggactgggtggtaacaaagaactagaaagatgtgcttctcatatcttgatatcaatgtctatcagagaagatggagaaagctgagagatactagtctagcttgctgtgcaacccccttcttctgtcccatcctccttcttatgaaagacttcctaaccctcctcctaaagcctctttttctctgtattttacacctggtccatgcccttaatatccagtccagtagagatgaatatgcctagttcctggtgtcctgcttttatggccttagaaagcctttctctaaacatctctactcttcatgcttgcattcaggcttcatgtgaaacttgcaaacattgagcataataagaaagaatacatagtaaaccatcttaaaagaaagactataaattattttggcactaaaactattaaaaagtatatttcactttagtagacagcagagaaaaatctcttttttaagtttaaaagaaaaatgcattttcttagcagaataaatgagttaacagagtgtggtatggattgatcaaagacataaaataatatattttattgcacacttctagctctttgctggaaatacttgactataaaaaccttttaaaaagtagtttgaaagacagggatatagcacattgtttgtcttactagcagaggaaacaaaatgatcaatgaaagcagggtaaggatgaaggaatccttaaactgttttccatgcatatgattccatttaatcagcgctggaacaaaggatagcatttttctttcctttttccgtgtgtgttatttcatattattaaatgagatttgagtgaactgaagtaaatcagccaaaacccagcttggattagatcccctaaacttccttatgcccagattttttccagatggtttctcatgtcgccagtttaatatcaacagtgtgtgacacgctagaagaatatttcttagaccagttcagtccttgaaagataattatactgtcagttgccatcactgttactgtgaaagtgaagataactggggtaagtatattaaaatccagccccaaaccagcctgactttcagacagtgcatctaggaaccttcgctcatttttgtcactatctgtctatgctacccgacgtaacactggtatctttttgacagcaaaatgtctgcaggtcactttttggttatatgctgaggaaaatatgaagaatttttgcatgatgaaaaagatggtgtgctcatgtctgcttaaaaactctgatttctctgctttccactttaatttacaagttgaaaatgtattttcatgctactacccactttggatcttttttattgtacctctgacattacttatagcacatttcgcagctgggtttaaaagcatgttagcaggcaattgtaggtaccgtgtcaacaaatgtgggaaatagaacaagactaacacataaggaatgcctgcaaaatcatgatatgaggtgaaaataaaatggtttcatgaaaatgctttttcttctttttattttaatataatcacaatcttacagaaaagttgcaagaatgctggagagaaggctggtaatatgtttaccagagttaccagttgtcaacattttgaacatttttcccatatgctttttgtcattatatatgtatttttcccttgaacaatgacaataagttatgaacatcttgccactttacttttaaataattgagtgtttcctatgtacaagaatattttcttacatgaccccagataaactaccatgctacaaaattatagtgagtaaaatactgttgtttaatccacaattcacctttaaattttgccagttttcctggcaaatgtactggatccattgcatttaattgccatctccagttagctctgggatatcatgaagctgctttcaaaaatacagtattttaaaagacaatatggagcagctaccccagcaagcctgccaccaagagctgttacgtgaccgctgtgtcactgctcaccaaactctgttgtgcttctgcttttctggtaactaacttgcatcttacagattaccaacaggaagcatttcaaatgcaaatgttcatctgaaaataaatccctagagatctctgagtatctaaagaggtaaacacgcaaggagtctaaagttgcttttaggttgaatatgcacatttatttataaacatggctgtaaccataaatgattttctgcaaacttcatgtttatatggtgattacttcacagaattttcttatctacatatttgtttggaatttctgagatgatgagtgagtaggtgcattcactgaaataattattttagcatattaaataaaataccaaatagtgtgagatcctttcaaactgtaagatacttgtgtatgtagtttcttgagatatagaaagtagacttgtcagctgagcaacaagtcatgggtacagttggtattctttttttgtttgtttgtttagagacaaggtctcactctgttacacaggctagagttcagcggcactatcgtagcttactgcagcctcaaattcctgggctcaagcaatcctcctgcctcagcctcccacgtggctaattttttaattttaatattttacagacgcggtctggctgtattgcccaggctggcctcaagtgaccctcctacaggcatgagccactgcactcagcctggtattcttttagtagtgctgtaaggggaaaacctggtctactttaccaagccacactgggtttgcagttaggactcagagtactaatccttttcctgccatttcttagccctgtgacctcatttgccttatctgtgaaataaaacgactcaggcacgtgatctctgagcttctttcagcactacagttctgtgaaaaagttggacatctgcttatggccacagtaaaagtagaggaaaaaaatcattaatttaaaaagctgttaccatacccaagcttgttcttaaaaataatatatgcagttgatatccatttactcattagtgaaaccccattagaaatacaatccccagaggctgggcacggtggctcatgcctgtaatccaagcactctgggaggctgaagccagtggattccttgaggccaagagttcaagaccagcctggccaacatggcgaaacccaccccccaccgtctctactaaaaaacaaaaataaaaattagccgggtgtggtgatgtgcgcctgtaatcccagctactcgggaggctgaggcatgagaatagcttgaacccgggaggaggaggttgcagtgaaccaagattgtgccactgcactccaacctgggcaacagagtgagactctgtctccaaaaaaaaaaaagggaacaattcccagtttgaaattgaaactgattttgcttactgtatgactgggacctctgtgttcaggactttttccagtctcatacgttcccttctaactccattctacctttgtatttcttgtcattaaaagaagaagaaaagctcttggcattcccagtagtttgccctgtcatcatttccatcttattgcttaggccaagaaaacatccttcagttaatcatttgtgtgaataagcatcactctgaaacttatctcaaaagcctcccctgtttatctgcaggtctcttctaatactccaagtagttcttttccaattatgcagtaatttaccatagttacactgtttcctttcgtagttcttactgtgtctgtctgcttacacttacctgatcagcaaaactaactataccctgtatctcaaatgattctcatactgaaataaacaaataaaaattcagaagtgagaaagtggaaaagccagatcttttttttaatgttttttgtattttactaagcagatttatgactgaaagaaaaacattttaagcattttatcctcctctgttttaaataactattgtggggttttttttttcagaaaattatttaaatacactggctctagttaaaataacttggttttgattcatatattaatagttaaagtaaatattttgaactttcccatgaataagtacaatttagttagtcaagactttattattttatgaattatataaaaatattgttctctttcattcatgaagggaaggagaatctggtcatctagttggccagtgcatataatccactcagctgatgtagatatctgagtgtttatgtcaggcaaatgtgctccaggaggctgggataaagccacggatgtggcctccatgtggctcagcacttgagatgccaggacgcgctgccaacacctgggaataatagagaatgcgaatacctcccagattatcatagtatataaaccactccctgggagtaaatcaggaaccttgttcatgtgctttcaccctttccagactcctgggtaccttttaatgatcacttctgtagtgtattgcaggatactctggcaacaacttgaaggccttaatgtgactgccacaactgcctcgtaagttttcagtattggaggattatatcttagagagtctgtttaaaagccagtcactcaaatacctacaaggtccaggtggtagcacatgagtgaaactcgcactgggtaccatagtgaaagggaaaacttggcctgcttaaagagggcagctgtttctctgctccagtgaatggtaccaggtcagaatgtgggctcagagttatcacttcttcttgcctttaagaagaagctggaaattcagattttttgttggtgaaatctcctgaatcttaaatactggcaaatttacttcaaattaagaaagactgtaccagctaaatacgtctgtgggtcatcagtttgtgaattctgaaggagaatccaaaaatatattaatgtgcttcaacaggtaaattttctgttgactttagttggttatgagccacagggcctggggttctggctctaaatttctacataggaaaagccctgtgtttcctgtggacttgctatctcctatcctaccatttctctatcatggcaaagatgtccatggacttcagaagttctattgagagtttcgaggaaatctcagacctctcatcctttgtgtttctttcctggtaaaatggagattgctggggtccaggccttcagggtagaggacacatctgtatacaacacattgttttcctttctagttgatgcattagtcagtgtaggctaggctgtgccatataacaaactcacgtggaatgttcagtgactagacacacagagactttatcccttgctcttaccctatgtctaacagtgtgtgtcaacaccgttggctgctcagtgacctacactaacaaatggcttatttctctgtgatgctgccaccctcaacatagggcctctagggacttcatggcttaggaagagagcagtagcagggcacatcagttttgttcagaagtgatgcatattactcatgcttatggccctttgatcagagctagtcatgtagttccaaatgaactgcaagagaggctgggaaacgcaaggtcacacataagataaatatctcacaggagatatgtgctcctacaatgatgttttcctgaccatcaaactcagacttggggctcctgttaataagcaactatagatggttttagccccagtctttcctagatgccaagatcagtctctatgggtatgatctgtaagttatcagaagaatcttctagcttaagtcttgtgaatacaggttggagcttgggaacaccaggattttagaatccaaaagattaaggggcctcctcatccacagctgctgttcctctttccctgccatgtcatgatcacagcctgagagaaaggagacaaaaaatcttactgaaggccttgaccagcacgtgacttcccccaataattctgaagttagagttcaaccaagaaattgtagagaaggatgagggagggtcttctggttaactcctgccctgaatggttctatccctcagtttcacattggttgatcagaagtgtaagtttccacggtgtatgggggctgtgtagaaaagtttgcattttgggggttttgtgaatctttgttttcctggaaaaatgttcacttttatttcttaattattttttaattgacagataaaattgtatatatttatcatgtgtaacaggatgttttgagttatatataaatgctgtggaaggactaaatctagctaattaacacaggtattatcgtttttgtggtaagaacacataactttaattctttagcattttttaagaatacaatctgttgttattaactatagtcaccatgttgtacgatagatgtttaacttattctttctatccaactgaaattttgtattctttgatcacccctctagtccctgttccccagccacccaagtccctggtaaccaccattctacgctctgctgcgatgagatcagattttttggatctgcatataagaagtgagatcatgcagcatttgttttttctgtgcctggcttattttgtttagcattacgtcctccagatttagctatattttgaagtggtagcttcacaaagatgtagaccatttgttagtctgggtcactgagtaagcaaccgtgccgacatacagtgttagacaggttcattctactgcaaatgacaggatttccttcttgtatggctgaatagtattccattgtatatatataccacattttatttattcgttcaactgttgatgggcacttaggttgattccatatcttgggtatagtgaatgatactgcaataaataggagactgcagatatctctttgacatattaattttatttcctttggatatctacttggtagtgggattgctggattatatggtagttttattttttgaggaacctcaaaaaatgtacatatgttttcaattcatattgaaatttgtataatatatgaaacaattcctattgttttccgtaatggctgtattaatgtacatttccacagatggtgtgcaagggtttccttttctctacagccttgccaacacttgttgtctttcatattttttataatagccattcaagcaaatgtgaggttttaatttggttttgtgtggttttaatttgcgttttcttgatgattagtgatgttgagcatttcttcatgtagctcttagaatgttggcactttgaaatagttttaaccagtctgagcaaagttctctaatatgtacactgtcacagatttataggcttggggatcagtcttgatgggggacggagaatagaatgactacaactcgtatgtacatcttttagttatgaacgactgagaacccaattcaaaccagctcaagcaagaaaagaaattgattggctctagcaactaaaagtccaggggaaggactggctccagttacacttggattcagcactcaaaacactgcattggcactcacactttttctttcactattgtgttgttctccatgctggctttatgttgagccactacatgttggccctagctttagaaattctcaggttcattcaagtttagcaaaagaagtattagaatcctttcttgcatcctcaaaaatcctcagattcactcgaattggaccaatttaggtcacatgcccggccctgaagcaatggctatggcttgtgatgtggtgattggtttcatagatcaaactaaaaagtagaggttgttgccagatccacagacaaaaaaaagaaaagaaaaggaaaaaaaggtagcaggggatcaacacatatccactaaagcactaaaggggaaaatagataattacctcagtatttcaattatttaaccttagtatgtttttctttctacccactattatcatcttttcttgtacccgctggcttgggatactatcttcagaatcccctagtagttaaaactctgctaaagaaatttaactcttaaggtatattttaatctacaattgtaggtcaatacagaaatactttttactgaagccactattttatttttaacatggtgctatttgtacatctggaagcctgcagatagctggaaacagtttggatgtccttgaaaggaaaaatggttataatctctggatttctatttagatttatgtaagtcaaagaggttgagacagaaatgattattttccaaatatcttcccccatactttattccttttctttggtttattttacagatgtatctctgtagatagatgtgttcctcttgaaaatgtttgcagtttccctgttttttctttttttttggaaatgttactttgttaggaaaatacaccctactaattgcattacaaatatctagttttatcttagttataaactttatattttaatatttttaagtttaaaaagaagaactaaaccagatattgagacatttagatcctcatactggtgaaaaattaaattttgcttcttgtgcctctgtatctgtagcagataatggaaggcatttgtttgagagggccccaaatgatcacatgaaatatatggaataacattggccatatgaggatgggagatggaacttgtgttatttgaacttggaaacatactgttttccaaagtatattcttagagaactaatctgcaaggattacttggtcagacagatagggggaaatacgatgctttacttttctcttgaagactaaaaataaacatgtcattaagttttctggcaagttctgtaatttttttaaaaagtgtttaacactaacatcacatttacgaaacttattttgaccacagtttttttcccaaacttattttgaccagttttttgtttgttagcatgagcagctattaacatcccctggaatcaaagggccaactttgagaaatgtgttcttcacagtattgaaaaaggaacccatcatgtatgttggtaaacacccctttcacaaaatttaaactcttttcagtttaatcaaaaggaaagggagcttttcactgtacaaatatgattgaaagccctgtatatattcactcagatttctcaggtaaggggaagggtatgtatcctggaaatgacagcatgaacacttgccaagccctcatatgaatcagtgttcactcttgtaaatcataaatccattagccaccaagagaatttctttgttttattctcaaatttgcaatgaaacctgttcttaaagtaattcctttagtaatatacttgtgcaaagtaaaatcatctttaaaattaaccatttctcatatgtaatttccaaagttaatttctgaaaagcagaatataaaaattaaaaacaaacttcagtgaagttcattgtaatctgtctaaggtttattcactctgataagaactgctggtaaatttagctaatttctcagaagagctgagtctgaaaatatttccttataaattagtttatttggtttgtttatactaacagtacagttattttgatatacctttaaattatattatctgtactatgattttatatgcttttagtttaaaataagtatttcgcatgaatgcatgagaacccacacttattttatatttgaatgtgaaaagcgattctgctaaagaaattcactgccaacttactgaaattgatggagtgtatgtttttagtcagcatattatcaaagtgacatgcaaagcctgagaaagatgtagccccaggaggaaacttcatctgaggaccctgtaaatgcaagtaaatcaatttttaactacagaaaaattcaaattataaagacatcttatccacattaccttattacaaaatagaaccaataatatttgtattaccaataaattgaaaagtgccagaatgaaaaccacaagagtacttttcaaaacaatatcattaaataataaagaaggctaattgcagaaaatttggaacaccgtaaggcacataaagaaataccccaccatcctaacaccaaaataactgcaatgtgttggcatagttcattccagtctcactcatgttatatttcactaagccataaactatggtgttttcccatgtcgttttaaaccaagtgaacatcactttttaatagcagcattatatgccttcacatgccaaaacaaaatagtatttttcttaatgaaaatataatgaaaataaacttttgtttctattgttttgctttttcccctgagaataaaagcaagttcattgtaagaagggctggcatcagctttttataggagtacgtgcacagatttcaaattactgtgttctgttaggaatatttcataggaaaatcagcaaaggtttttctctagtttcctttccttagttctctaatcaaggcatagaaagaagacagcctaggatgagagaggccaagaactcccttataagtagttgtttggaagaagagtagaggaattgtaaaactcagccagataaacaattctattgaagaagccttatctgctaggtaaatctgaaatgtgttaaagtgattttacctaagccatactcctaccctttggttccttaggcctcatcaagcaacccccttgtgagcctcccccttctgaatctccttccctattttcctgatactctccccaccacacacccttattcctctcctgcgcttagggaactctggcacttggaatggtgtagccaaactgtaatcatgccttcataacattgtattgacaggcatctgtgacaatttcactctcccacctgattcttagagtaatgtttaaaaatttttggaatatccactcatgtttctcttgaatctcaaccaatccaaaaggttcagctcagtgtgattttgtgtgtgacatttccaatagttacacaccttagaccttggtccagcatgaggggataattaataagtacactttttctgcgggtgcttttggcaatactactcttaccactaatctctgagcataattgactacaaaaaaaatcatgtgctatttcataaaattccaagcatgtgcagacaccaggtagtatccaccaactttgggccaatactgcatacttggcatgtcataatgatttttttttaccccaggaagccatgctgaattctggtgataaaacacagtgagagaaacatcagctcttaattattttcattaaaaaacataattccaagaacaactctgaaatcatctagagtttggaatatattccagagacacacattctttctctttcttcctctcatcttataagatagggttatatttagttggcttttttcataaacatgtattttacctgaatttgaagattaaatttcttaatatttatatgaagaatgtagacaagcactaatggtgttttgttcagtctgaggagaagaaagttaacacaccatgaaagcataggaatgttttagaagatttttagctctcgcaattgggaatctcctggtttaaatttctatcatttcagcctcagggcaatccaaatcatacagggcttggacttcattgcatcaattctaatagtttttgcttttcttccccatgaaaacccccgtactttccttgtattgaggtgtggcttcagccttcaagggtccattctcagtatgcttgaaatctgaagatgaaatgaatttcataactggaaaatccagttatcaggcatgagcaaatggctgcatttgtttcagattcttttgctagtcgcttcattttcttctaatttaacaaggtcatgtatgaaattagactcagctgttatttattttattactgagctccaaggtataaatgttcctctcctatctagaaatttgctttcgactttctttctctttatatgtacgtacctatatcatgttttgcagcctccatagatataagctcaaagttaattttaccacgtcttttactcatctagaaaagaaaggtagccattctctcccagtgaacaatcaaattctgctgccttgaggaacaagtgatcagagcatttcgttttaatagaaaagctgtttttgttttgttatatttttttcttgcaaggtttgctttcagagctcttaaataaggatccactttcatattttctgcttgtgatttggactctgcttccgaaatgcatttgaagctgtctgataacacaaggcacatgtattataacatcattaaaatagaaagttaaaagttgtgggtgaaggaaggcaaacatttaccagcagaatgaatgaataccatgaatgaatgaataccaagaatgaatgaataccatgcataaatgaataccatggatgaatgaataccagctctagtgaggacctagggctaagccagagatcttactgagagccctgggcagtggaggcagaaaggagaaatgatggattacttagttctggttggagtggtgctggagtagggaaacctactggatcatcaggagaggcaacttttctatagcactgatttatgaaaggcatttgtaatatgtgtttttaaagatagggtagactttgaaatgattttaatgatttttaaaacatttcatggaagcatatcatgccctgagaaaagagcacataagaatagggctgcataaattttcacagactgggcacatccatgtaaccagcacccagagcaaaaactggaatgtctaagcctctcaacagtcccccgtgtctctttccggccacgactccctcctccccaaaggtaccattattgttgacttcttagaagataaattggcttaaacttgtttactttatatattttaaaacacatttcaatcatttgctctatctttacttttaaaataataattttgttcacttatggtttcatccatctattcattcaacttattgattcaaacaaaaattcttaagcacctgccatacgagtaacaaccatgaggtttagaatattttaaacctttcaattgtttcctattttttttaatttgtatgcactaaaattcacttcttttctctttctttctttttctgtgaatgattacatgaattttgacacatgtaaattaatgtaaccaccaccttacaagagattcagaacaatctcatcaccccccaaaagcacctgttaataccctctgtagtcctacattctttgcagacccctaagttctggcaactcctgatggagctttatattttgagtttcaaggcagtaatgaggatacatttttcattcttcatttctcagctgcaaacattccatttcaccttcctctatctctgcatctccatcatgctaaagtcatttcattttctgactgcaaaaggccaaagtttttctatccatattaagaaagatatttttctggtcaaaaattgcagtgttccaccagactgactaactttgttttctgcacaaaatgttttttttttttcttcccagaggttgagtcacttatgctgctgagcacaggaattttgacctttgggtgaggctcactctgaatcttccactgtgaataaaacagatcccaagatagagtggaaaagaaatacccagagctgaattaggagcagctggcagatgggctctgaaatgcaaaaatacccttttgagtttctcaaaattctagttctctaagaaaatatttattttttcccaattaatccacactcaataatttccccaagttatcttttgattgggaagttctgtaccacattgtagtaacaccgataacagtgaagtaggtggtgctttggaaggaaatcaatcaacttacattgttttatgcataacggcagttggaaaactgttcctatgatttcggtggtattctgccttctccatctgaagggaaacacttcatacacttgcctgtgtaagaaaggtgagtctgaattgcaaaatgggctttgttgataacttccttagtcttttatttagtatgtcatattacgaatgcaaaatatattccgtagagaaaagcatgaaaatacaatcaagcaaaagaacattgaaaacaccctactcctttgtcttcagaagcaatcactctttttttttttaactttttataatggaaaatttcaaatgtataccaaagcagagaaaatagtacagtgcagtcaacacacctattgccagctccaccagttatcgactcacatctactcagagttcatatctaccccaaccccaccctgcgctgagtattttcaaacaaatccaagacatcgtatgatttcattcataatcccagtgcgtatgtacctctaaaaggtaatattttaaaaaatataactataatgccatcatcacagctaaaaaacattaataactcctgtttatcgttaaatattctgccagtacaagcttctctgattaactctttttggccatatttgggtataaatcgttggaaaaaccactatttgtaacatcttggtatatatcctttccaactcttgtctttcttctccgtgcgtgcgtactccctgcgtgcgtactccctgcgtgcgtacatatttatgtgggcatgtgttcccctctagatttcctgccatagataaacacatgtactcatattcataaattggcttatatctgcaatacttttctggaacatcttttcataagagtacatgtgcttccctcattgttttctcccgtgactatttagaatctcataggatggattactattattcattttgtcatttccttttcactgttgattgtgaaccatccttcactgaaagtaaataacatttaaattatcactgaatataaggtcagttacctttagatattagcaaaggtaatatattggtgagtgaagcaatgagcaacacagaatctgtctctgatgactatttttgggcaagtgtgttttactttcagttaatatgcttgaaccacatgctcctataactttgtatgtttttgtagtttgtctgacaccaagttacactgccaggaaagtggccactgttcatattaatctggaaagtctgagttgccatgataagttgggtgcatgatcacaggtaaatagacacaatatttgagtcacagtgttttcagaccctgatgagttctgatgattcaggaccacttggccttatttacatttgtgatattctgcatgggtgggacgtgtactttggagtcagataaacaaagcgtgaatcctgcctccagcattttttgccgggtgacttagaacatattaacatctttaagcttgaaatgtcttcacctgcttaaggaagatagtaatagtgcctactcatgaggtggttgtgaggattgaatgtggtaatgatgcagttatggggccttgcatagtgcctggcaagagctcagtaaatggtagcagctttcagttatagttaaaagaccaaactaaatgccatatgccagagactatgcacagagagattccatttatgtacagtataacaacaagaaaatgaatctaagccatgagaagtcacaatggaagttatcttccagagggcagtggctagaaggaggaacaaggggctcctagggtgtcgataatattattttcctgaatatgtgctggtgacttagttgtatgcagtttcagaaaatccgttgagctgtgacttcattacttacgactatgcatcttcaggtactttatgtttcagtgaaaagctaaaactgaaaaaatataaaacaaacagtataacattaatcttatttgtggtaataaggcacctggcatatagtaacatagaagatagacagataaacagatagatatagcgatatggggaatactaatcattgttagcaatttgaaccgttttttaaaattaaattttaggaaaattgagttgaaaataatattgattcaagtcaaacactacatatattttgaattggtcgttctaaactcttctccctcatattttcaagacaacattccatatttaagttggaagcagatacttgctttgctttctctggttttctctcgggagaaaatattaggggtgcaactgtggcatcaccagcctcatcttgcctgtctagagcagagcagagctgctgctttgaaatgagttattgggagcctcagaaaccctgaagaggtttggccatacccagtagcaagctctgcttatcaaattgtcccaaagagtaattcttttctcataatacctccaagaagcaacaatcaattcatgacctttttttgggtagtgacatttcaagtgctcagaagaacatctgaagtttgagaaaatagacccgagaaataggtatttaatttacttgttctccagcaatcacactcattttgtcaagcagaatgaaatgagctaggcacagcatttcatatggtgaagcttgctgtttggtacagctttaactgccaaactgaggggagccctcaggatgtgtttgtggaatttcctttgtggaaaaatttcagttctcactgttgttagtccttttgtctcacaatcatacatgtgtacttaaaaagcctaagaggtaaaatatttgataattctccttttgaaatgcaatgcatacagtgtagtcagatttcatggaagtcacctagtgtagagattttaacaattaaaaactagtttaagcagatgggtcataatcggtatttcctaatgtgaatatggatatggaaaatataattataaggatgttagaccctctcttttgctgtcacagcacacagctggaaattgcttattattagcttgcaaatcctacaggaaaacacagaattatttttagtactcagcaaatttatggtggtaattatgagtacttgcatcacttccggaatgcaagagtcctatatctttagtctccatgttgagaagataatttttatcacttgtatgccctgcatattgatttctgtggtcactgggaatcaaaagtacttttctggtaatacaatgggtgacagtagtcattttgcaatgtaaatggtttggaaggctctgcagccgtgggtttcttaaatcttgaaaatagataaagtaaaaaaagaattgccttattttcccatcaccaaatttgccaatctacctgcatctgaagtcacaccttctgcctccttcccgtgacaatttggagtcattcttctggctctgttaagagtcaaatccttccctggtgtccgggatcctatctgcctttagcattacttaagaactccactcccactcccacactccatctccctgggatcatctgtgtgcccccattagtctacatgccgtaactgtggcctcatttactgcaaaagtcctcagagaattagctatgttaatggtctccacttgctctcctccccttctctcctcagtctagtccactgggtttccaaacccataagtcttctttataagtgacacctccatctactatttcctcaggctgagaacactggagtttataagttttcttataaactcaatctccaaaatgtagtggccaatggaaaacttcctctttaccctctgaaggtttgctgaaaatcaactgacaaaaggcagattaataggtgaaaaggcattcacattggttaacattcctggggagaaccagagtgattaccccatcacatcataaccataacaaatggttatggctcttcttcttaggggaaaggggagggagaattttagatgatttgggggattagtaaatgatttttaggggaattcagtgaacttgaagaatacacaatggcataggataaagtctgtggggcctgcacaacagacaatggttgggcctgcagaacagacaaagtctgtgcaggtgtgttgacagacttccatttttcttcctgcaacatgagttcagtcaatacaaactcagggaagggaccagacatgactgttttcttctttggcaggtctggactttaggcagataaaggaacttcagagaacaatccatcatgtgctttgggagagacagaggattgagagagatggggaagggagatgtcagagagaccttgaggcttctttttcagttcggaaggtggaaacaccatattataagatactggtttctaagacctgacaagaatatatttgcaatccaaccatttttcactgtctctgttgatgtgttcccaactccatcatcagtacacagacgtccactggttgtcacccaagccctgcttcttgctgaatctaatgactgtcaattatttggtctttttaaatttgacctctcttgatgaaactttttttctctttgtgcctctgtgacctccagttatttcagtatggagaacttaacaaaagaatgttatctgggtaactgaaagggatatgtagaattgtgtatccttatatgatgaatgtgttaaccaggtaactgaaaggtgtgaaaagaggtctctaaggcgttatggaggcagtaattgcaggaaagagccaccagcttgagggaagaaatctaaatgacttaaatgtagattttcagaggagcgtccctgaggagctgaaactctggcctctgaggagggaacttgtgtatttgaggtcacaggaggggcctgtggagctgagatctggtccttgaagaagggtgtgctggctgttgccagctctgcagttgctgagctggggactatgttatgtgagtattggaaaaacagcaaaatgaaataaaccactggctgggcacagtggctcacacctataatcccagcactttgggaggccgaggcaggtggatcgcttgagcgtaggagtttaagaccagcctgggcaacatggggaaaccccgtctctactaaaaacacaaaaattacccaggcatgatggcgtggacctgtagtcccagctacctgggaggctgaggcacgagaatcccttgaacctgggaggccaaggttgcactgagccgagatcatgccactgcactccagcctgggcgacagtgccagactcggtctcaaaaaaaaaaaaaagttctgccactgccagggtggagaagggagactggaggaggctcacgggagtcttgcctgttccctccagcacctcctagggccagagcctaacagggagccactcaccaatcaagaatgccaggtcttagccccatcccacaaagcagagtgcagaagggtgaatatacatttattggataaattaactaggaattcacctagtgcttggtccatgactgtattcagctagaccctgggaggcatgtcatgagtgcctggtgtgcatatactttgccttccaagctcttggcattttccttgacctcacaactagaaaaaaacatcaatttggttgtatatctgtaactgagagtgcttgtttctaaaaatgcagattatataaacatacagaagcttatatatacttggcaagaaatgtgcaattagtcacgtggtggaaagtccctccgcacgactcatgtagtctacctgctagaattctacttcttttatgtcttttgaaggcaaatgccatgctgtcacctgaagaatccactggcattctgttcatgtaggtagtagccttcctgtctttttgcagtgtggagaagggattgggagaaaagacgtgtcctgcaaaccctgagacatcaccaaggtttgcaaactgtggttcaagttcttcacctcttcacatccacaggagaaatatctgttctgacattgtctttagtgctaaactattgtaatcaagttctgtcggggttgagagatattccttacttagtagaaaatatctcctggagttctggcaattgaaaatggcctcggctctcacctgacttcccctgcaattgcaaaaaattcatcagctgagtcgggatgttaaggcaaaaatatgatttcttgaagagagagggaggagaagagaaaaaaaaaataagtgcagtgtggtctaccggtttgtgtcgatgctattcaaaaacatctctcaatccatttatcctttccaaacccaggagggtaccagtgccatccccttcctaattcaaggcctgctctaccttcaatggcctgtgcaccttgcctacctctggaactagttctgtggtctctttccctctcagttatctctacaacttcttagcttagaagtcctcttaacaaaagactacataaagaaatgtgaaaaacggagaaagtatagggaacacatttaacgggcagattatgtatcaaagctaatgtccctgaagtctcgatattcatccagccttttagcatcgttgcaagattcatcagtggagaaattggggaatgcaatcctgcttcattttctgcggagtggctccgtttggagcaggaacccatgtagcttgtaatctcctacgtaatcttccaaaggctttctgttttcttgcagacaagcctttatgctcttcccagtgccacattcctgagaaccctagggctccaagaagtgttctgtttgcatccttcatgccatgtgttttttgtttttgtttttgtttttttttcttattgagatggactttcactctgtcacccaggttggagtgcagtggcatgatctcagctcactgcaacctccgcctcctgagttcaagtgattttcctgcctcagcctcccaagtaggtgagattacaggtgtgtgccaccacgcccggctttttatattttctggtagagacagggtttcaccatgttggccaggctggtctcaaactccagacctcaaggccaagtgttttggcctcccaaagtgccgggattacaggcgtaagccacaacacccggcctgctgtgggtattttgtgatcacactgtcccctccaaacacaccttgtggaagacacttgctctgccattctggatttaaaataactaaactttaaaagttaggagtaattttctatctgggtattaccctaaagagtcttccaaacgactccaaagattttaccccatagaagtattcctctaagtgtcccctgcaacttcattaaatttatccgggatatttgttaaaaatgcagccccctggatctcactggagacttctaaaacagtttcagagagtgggggccaggtttacatgtattttttaaaagttctacagtctattcttacagaagcaaaagttgaagaacctctggtttattgtgtagatttttggcgtcatagaaagaaagcaaattatagagctaggaaaggaaaatattgccagcttaacacttgagttatctgagataaaatggaatagcttttagaaataattaagcatctattttcatgtgttttgggaaaaaaatgagatgtaatctcaaaccagtgattccattgatattacagttgacaatgaaactgaaaaaaataaataaaataaagtgaatctttaaagaaaaaccctaagcaaataaaagtaaaagggatttaaattggtggaagagttctattgttgttttcaaatccctgttcagccactaatgaacagcgtcacatcagacacacacgtttcttcatgttcccttccttgcgtagtgtacccacagggggcactggtacccatgccggggctggttaccaccttcccgtgggccacagcagcttcccagcaatgctccaggagcatggggctggctgcttgtaaaatcatgacgttattgtcttctgtgtctacttccactttcctcctcacccctatttttccctacaatgtcccatctcccccctgacctgtccatgccagtgactataaccttcatagtcctctagcttgacagaaaggaatagccatctttatggatttctccaacagacgggctggttggcaccagtctttccaggatggagcttgctaatcagatacacataatgatgctgatgtgccagtctaggggactacactgctatggtccaacttgcagtgacacagtggatgcagcagacacggtcagtgggtcagtggtccccctaccccctttgatctctccgtgtgctccatctgacttccagccaccactatctgtgctggagggttcttttttcttcttcttttttttcttttttttttttttagatggagtctcgctctgtcgcccaggctggagtgcagtggtgtgatatcagctcactgcaacctccgcctcctgggttcaagcaattctctgcctcagcctcctgagtagctgggattacaggcatgcagcattgtgcctagataattttttgtatttttagtagagacaggattttaccatgctgcccaggctggtctcgagctcctgacctcgtgatccacccacctcggcctcccaaagtgctgggattagaggcgtgagccaccatgcccggcctggagcgtcctttttaccaagtgcagagagccttgaagcccacagtgctcaggaattaactcccctaggagcatcactcatccagtgactctctgaatatggcatataaatatccaagctctctcccccagggatgggatcattctgtggcctgtagttgcaccttttccaagagctttccagtaggattaagctccagttgctccctgaatcatccgtcttaatagcagacactttgttggttgccttcttttccctatttcactgcctcattttttttttttaattcacacttcctgggactacctcaaaaataaactactagccctgaatttgtatctcagggtgtgcttctgggaaaacccattaccaaaacccgtcacactatcaacagaaacctcatagtgctgcaatgcctttcctttactattaaccaaagtgagaatttaggattatgcatccaattcaagtaaagggctggagtatctttctgattggggaaggacaaagtttgtaacagacgaaagctcttagcaccctcctagccaccctccagctgtgccccatatggttgttaattgaatgtcagttatggcttttccctactaataccctaaaatgcccttgttcatcatctatttgatctgttaatccagctaagcccatggttcccaaacattaacacacgttgagatccactagaggaccttgttaaggccacacattactggaccactacttcacccccagtgactctgatacagtaggtctggtgtggggccttaggatttgcatttctagtgggttcccaagtgatgctaatactgctggcccagggaccacactgagaactgctggtgtgagcctgcattcaccataatctcttgaaacatgaagcttggtgtttgcatctgagataaagcattaattgatttttcttttaaaattttatctattggttttgattaggtaatttatttacctggcttaaaagtcagagcatataaaacaatagatggattctttcttaacatgataaaacacactgatctcaatataaaagccagcctcatgctgaccaggaaaacactggaacatttccacagaaggaatacaacaaagatgcttattatgtctacctaatttatcattattctggaggtattctttatgaataatatagagaaagaaagcccaggagaagcaaatgaaaaacaaactatttgtacaatagaaatgttcaataacttggctgtgtacaatattaatgtgaaaatatcagtaaattttctgtacaagcaataaacaaagagaatatatagtggaaacagaagccccatttttcaaaaatatataatataccaaagaatatagcatattttaaaaatttgtgagatctacataaaaaatcttaaaaatatcctgaagtttacaaagaaagacttgaaccaatgaaagagacaatgttcttgagtggcaagactcaacttcatacatgttgctttcctttaaataagaaataaattcaatataattccaataaaatactatattagtccgttttaacactgctgataaatcatacctgagactgtgaagaaaacgtttaattggacttacagttccacatggctgaggaggccccagaatcatggcaggagatgaaaggtacttcttacaaggtggcggcaagagaaaatgaggaggaagcaaaagtgcaaacccctgataaacccatcagatcttgtgagacttactccctatcatgagaataccatgggaaagaccagcccccatgattcaattacctctggctgggtccctcccacaacacgtgggaattctgagagatacaattcaagttgagatttgaatggggacacagccaaaccatatcattctgcccctggctcctccaaatctcatgtcctcacgtttcaaaaccaatcatgccttcaaaaccaacagtcccccaaagtcttaactcatttcagcattaacccaaaagtccacagtccaaagtctcatctgacggacaaggcaagtcccttccgcctatgagcctgtaaaatcaaaaacaagctaattacttcctagatgcaatggacgtacagttattgggtaaatacagccattccaaatgggagaaattggccaaaataaaggggatacagggcccatgcaagtctgaaatccagcagggcagtcacattttaaagctccaaaatgatatcctttgactccaggtctcacatccaggtaatgctgatgcaagaggtgggttcccatggtcttgggcagctctgtccctgtcgctttgcagggtacagtctccctcctggctgcttttgcaggctagtgttgagtgtctgcagcttttccaagcacatggtgaaagctgtcagtggatctaccattctggggtctggaggatggtggccctcttgtcaaagccccactaggcaatgccccagtaggaactctgtgtgggggcttcaaccccacattttccttccacattgcactagcagaggttctccatgagggccctgctcctgcagcaaacttctgtctgggcatccaggtgtttccatacatcttctgaaatctaggcagaggttcccaaacctcaattcttgacttctgtgcacccgcaggcttaataccatgtggaagctgccaagggttggggcttccacactctgaagccacagccagagctgtatattggcccctttcagccatggctggagtggctgggacacagggcaccaaatccctagactgcacacagaatggggatcctgggcccagcccacaaaaccactttttcctcccgggcctctgagcctgtgatgggaggggctgctgtgaaggtctctggcatggcctggagacattttcctcacggtcttagggattaacattaggctgcttgctacttatgcaaatttctgcaattggcttgaatttctcctcaaaaaaaatggggttttcttttctaccatatcatcaggctgcaaattttccaaacgtttatgctctgtttaccttttaaaatggaatgcttttaaccgtacccaagtcacctctttaatgcttttttgcctagaaatttcttctgccagataccctaaatcatctttctcaagttcaaagtaccacaaatttctagggcaagggcaaaatacctccagtctctttgctaaaacataacaagagtcacctttgctccggttcccaacaagttcctcatctccatctgagaccacctcagcctttatcttattgttcatatcactatcagaatttttgtcaaagccattcaacaaatctctaggaggttccaaactttcccacatttttgtgtcttcttctgagccctccaaactctcccagcctctgcctgttacccagttccaaagtcgcttccacattttcagttatcttttcagcaatgccccactctactagttccaatttactgtattagtccgttttcacactgctgataaagacatacctgagactgggaagaaaaagaggtttaattggacttacagccccacatggctggggaggcctcagaatcatggcaggaggcaaaaggcacttcttacatggcggcagcaagagaaaatgaggaggaagcaaaagcagaaacccctaataaaaccatcagatctcctgagacttattcactatcacgagaatagcataggaaagactggcccctatgattcaattacctactcctgggtccctcccacaacatgtgggaattctgggagatacaattcaagttgagatttgaatgagaacacagccaaaccatatcaaatatcaatataaattttataaaattttgttaataataaaaactttttagggcacttttattctcacatcaaaatcgagtgaaagagagagttctcatataccccctcctcccacacaagcacagcttccctcattatcaatatttccaccagagtggtacatttgttacaactgatgaacctacattgacatgtcattatcacccatagtccacagtttacattagggtgcagtcttggtgctgtacattctataggttggacaaacatctaatgacatgtatcctataatatcatacacagtagtttcactgccctaaaaatcctctgtgctctgcctactcatcccttccttccagcaatccctggcaaccactgatctttttgccatctccatagttttgccttttccagaatgtcatatagttggaaccacttagtctgttcagactggcttgttttattttgtgaatatgcattttaattttctccatgtcttttcatggcttgataactcatttatttgtaatccccacataaatttttgacctaaatttgtggtttctagagtacacaaggaaaagtaaaatagcaaggttagctagaaaaaaatctataagagtaatgagaaaggactaacatcaacagttattcaaacataatataaagtcataattatttaatcactgtgatatgagatcatgaatagagaatagaaaacccagaagtagccttaaatacataaaaatacttagtatattataaaattatcattttaattattgataaagggatggaatatgaaaggtgtggaaatttgtgttattaatattgttactttcagcactgctttggatttgtttacacctagtgttgtggagaactcactatacgccaggtagcatgctagacatttccataggtgttgacttgtttaatcttcataaaaatttgtgaggcaagagttcatatttccagtttaaagctgaagaaacaaaggcccagagggattaggtatctttcttacagttgcacagcagtgaatggctcagctggaattcagacccagcctttaactccctacttagagcgatttctatacatggagcttctagcctcactaagtagtttgctggccatttcttttaccatatgtgtactttctgctcatcattatttcatttgagtctttcttttctggtgcagtcaacatgaatttctagttagcaacttagatcatagaattgattttaagaaaagattcgtggccaggcacggtggctcacgcctgtaatcccagcactttgggaggccgaggcaggtggatcacttgaggccatgagtttgagaccagcctggccaacatggtgaaaacctatctctacaatacaacaattagccaggcgtagtgttgcatgcctgtaatcccagctactcgggaggcatgagaatcgcttgaacctgggaggcagaggttgcagtgaggtgagtccatgacactgtactccatcctggatgacaaagaaagactctgtcaaaaaaaaaagaaagaaagagagaaaagagagagagagaggaaggaaggaaagaaggaaggaaggaaagagagagaaagaaagaaagaaaaagaaagaaagaaagaaagaaaagaagagagagagagacagagagagaaaaagaaagaaagagaaagaaagaaaagatttgtaactattttcttttacaggaaattgactaatttgtttagttgagaccagccaggtagaggaggattgatggtcttcatggtctgaactagtagttcagcggatttgagcggtacctttctggtattctatccctgggcctcagacagagagaatgtgatcactagcttgggaaatagcatggccagttctgagcaagagctgggaaagtgatagtgtgagtcttgggttctcccattcctggggcttctcccttacctcaagaaaatgtggatgggtaatgaggctcctctgtccagggaatactggctttccagctactccagatacctcacaggtattccctctgctcaactggtaaccaaccggtcaacaccaacatgacaagaacctgacatgacacctaattcctctgcttccagggcctgtcactgcccctctgtcccaggaggaggtaatcatagacacgttgctgcttacaatgatgctgagttcattcacagccaacttacggtttaactcctagttctgaggaaagccagtactaaaaaaaaaaaaaaaaaaaaaaaaaaaaaagacaattacagttcacctgttgagtaaattcatgatttactagtgatttctgacttttattttttcatctttaaccggaatgcagaccttgtttcattaggtttattatgtttttaattactttaggacctatttggtggctaattatctgtatgacaggaaattaaactgagcttccatttgtctgtaggcactgtgaaacctgacttccttcctcccaccctggcccctttcttttttcaaacaatgataacatgaattgtaaatctggaccaaagtgatttgggtgcaacatgctcaggctatgcgttataaaacacttagtgaacatttgaaagatggccagatttttgtcaattgattatcaattgtcacctgttgatcgattcaatgtagttgacataggaggctcttccaccatctcggtcaagtgtaagacctctcacgtctgacttctgaggtttaaaacctggcatttgctactcggtagctgtgaaaccttgtccagtttctaaaacttccaatgttttagtgtccttacctataaaatggggataataataagacctcatggggtagctgaaaactaaatgagacaatatgtgtaaatacatgtcaagtatttcgatcctggtacatagtcactgctcaataaataatcacttctattgttaagacagagccaagagttgcagagatgggtcagcgattttgttgacagccatctgttgtctatttcagataagagaagagcattgagaagagctgcatgtttctgctgaccttgatagtagaggcagggtttgccccttagtctgaaattaggcaggaaggcctgcaacatatggactgtcacatgctgcaagctctgattatgtttgctcttgacttctcagactggccaggagatgctaatttaaagctcacagtcataaaagattcgtccttgccttactttccactgtctaactcttgcagaagctctcagtaatgacttctacaggtggtgtgattccctccccaggaaagtataaaagcaagagaacaaagtaaataaaaactccctaattcctttagattttatttatattcccatagcaaagctgaagacattctttatttagaatatttgtctcagttgtcttcattatttgcaatctcaggtataaaatatgctggaataactggagagtggtgaaaacatctaaagtgtatttacaggcctaggttcatttttcaaagctttctcttcttgtcagcctttgtcaaatgggttcaagcttttaccagtaagaagcaaatattacattggtgcacttcaatctcggtagttcagaaggaacccttatgcccccaagagctaaatttaccaatctgagtgacatatctgcatggaggaaatatagcagcaggaagagagacacacaagcacacacaaaccaacccgggctgcaatgataattgcagtgtggcggtccctggtatcctaggagtaattactctgacattctttatcattgtgtgttagatgtgatatgaagcaattatcaagttgttttttggaatattgatgcctggccgtctttgcacattatcctcatctcatgctgtgacccacaggacttaattctgacaccttgagtctctcatggcagattgataaggagccctggcttaatcttccctttcttaggatgagactctggtgtttacccttgttattaaggagaagtactgataacatgcgctactgccattttctttttccacttgcagaattcgatttgtatctcaaattctctagtgcctggtctcctactgaaaatattggcacaatggcatttattgctaattgtaaactaccctcataacaaaggcagacattattgtttttccttataattacttgcaatagtccccgtgttaaccctattttaatagtaatctaaggactatggaataaggtttattaagaccacatgcttcagatctgtgcagactttgttggaataatgcttgtgggtatagaaatttcactcttcaagaggtggtctattttcttaagttgaaattggcattgtgtcagtattttgctttcatctgaatagctgtttctctgctcctttatttcatttttttctgagagcagacttttatttggagcatggatcagcatgcccacatttagaatatttcatatcatatcagcttgtttgtaccacacacaataagaggcatctggcatctttcagaaaggctggaggaagccacttattgatgctgtgtatggctggccctccctcgccccatgtacaaggtctttggtgaggtatgggttggtaaacagaaaaagcagtggccaaaccatgcttatagctgtggcctgtggtgacacaggacacatatctatctgtgtgttcttctgtggtcagtgctgtcatccctgggaagagatttcagcatggtggtttggaataatcaagagtgtgggcattgaagacaggctgcccccatccctacatgcaataagacccacccatattttatgactataactataatttacacaaatatggttgcactaaatctcatccttttctctcttttttcctttccttttttcttttttccctttactttgcttagcatgatgtttgaaaggcctatttgtgttgctggatgagcccattgctgctctgtgctctatggaattccatggtgtggaatctgacttagccattactccatgacagccacttcaattggctccagatcgtactactgcaaacaacattcttgtgtatgttcctcacagacctgtggaagaatctctttgatgtacaccttgggtggggttactgggctgccctccagaaaggctgcaccaagcctcactcccattcataacatgtgcgggtttccatggcccccatcaccacattcccaccaacactaggcattactcagctctcattgctattttaatttctgcttctgtgagactaatgactcttatctctctgttgacttttttcccatgataccttttatggaatgttaactcctaactttaatgtaatcaaattaataaatgtttaacatattgatttgtgttttcaaatttttaagatgtcctttctcacatctaagtgacaaagaagttttcataccttttcttcttttaagtttataattttacttttacattagttctttaattcaccaagagttcacctctacagatgataacaggtagtggtccagtttatttttctctatattaggtaataatgtcactaaaaagtccttctttttcctattctgttatggtcacctctgttgatttcttagtgttttctttgtttcgtgtttccaaacattacttcattgtctttactcttcccagtgttgctttttgagcttgataccaatccagttcttactctgcactgtattctgcatttcttagtttttctttttacattttctttttaggagcttgggcaagagtgaaatgagagattattgttaaggggtacagagttttagttttgaaagatcagaaagttctggaggtccactgcacaacagtgtgactgtacataatactactgaactgtgcactaaaaatggttaagatggtaaatttatgttacgtatagttcacaattaaaaacttggatcttgcaattagtttaagaaataaatttaggaatcctcatacaaaaaatttatagcacaggaataaactttatggaaagtaattagcaatgtatgatgagccttaagaatgtccattccctcttctaggtgtgtcctaaagaaaaactgagaaaaatttggagagagaatcatttaagtttattcattgcaacattatttatgatataaaaaatacttaatctaaatgttcaacctgaggaatagttaaattaaggctggtacttccacaggaaggaaaatgcagctatcaagaacttgttttgaaatatatttaatgatatgaggaatattttaattataacattattttaaaaataagaggcataactgtgactttagtatgaatctaattctttaaaaattacacatatatacaaatagaagttaaagtgggagaaaatacactaaaatgtaaacagtaataatctgttggtggtgggactatctgtgatgtgtgtaaatgctttgtaaactgtaacttggcacactaatagaggcagtggttgtaagtcactcagaatgaaaaacttgagctatgccaacgtaatagcctaatttaatacttaaaaacccatatttagcatttagcatatagtaaaaattttcctatactatctacatatattatgttactcagttctgccaactacctgtaagataggtactattactgttctatttccttcatgaaaaaagtgaaactcagatgtcatacataggaagctgaagaaccatgatacatgtacccagaacttcctgacattaacccctactttttaccaattccaaaataatctaaacaaagaagaacaagaaaaggtagtcataattgcctaaatgttttagtatcttgttggcttgtggctcggtcaactctactgagagctcctgttgatggccagacccaagccctgtgttgaagatgactgagcaaagagctcaacagaagagtggctgctgggaatgccttcttatggtgggtgttgtaatgcttttattttgcagactctactggggccagtgaacaatgagggaatgaagtacatcattccacatgttagctggttaaagtcatggcacttggcagcctccttgagaaggtactcagaggtccgtggtcattccttagaggcatattgactcattgattaaaatgtgctggatttggtcaacttcctccataacaagtcatttataacacatattatttaggaaatccagaatgctctgagagctaatttaaattataagtactcttgaaagccatgactggaaatgactctcttagcccttcaggcccttgcagtgattggcagtgtacttccaaagaagggcttttaagtggtttggttcattatatgtgcattctacatccaaaagaacccatgccttgcatgggaggaattatgaggccggagcactcctctttattagaaatgtaaaaacacacagccttgccctggtcagacattcctacacccctggagagtcctaacacgggcttaaggtccacagaatcattgcaaattctgaatatgcatattctctcaatggcagtacatattttcccggcttaataggatgttaaaatgtggctcttgattttggctcaggcataagacaatgcctgctatattccatggagatcatcctacaaaacttttaaaaaggaaaggtatgatcccttaaagaactcaaaccccttcctcatactgttagtctgaaaggattgtggaaagttgtttttatgtttttatttgtttgttttgaggacaaactttttgaagataggtgctggtatatggtgaatctcattcttctcccacaaggaggagaggtggagaaagtgtttgcttctcaccttaagcctagtgagaaaagcttcagtaaggccattccaagaaagtcaaaaactttccttgaagttagggaatatattggcctgaggcgtgtctccacatgaaaaatgtaaaagattagaaatggtttatcagcttttacagtggtgcaaagggtaggtcattgctctgttaggattggatttattggggcaaaggatacaagagtggtacacacagaccagaaagttggaaaaatgctggtgtaggactatcttggattctgtccagtagggctatccagaagtgtaaacaggccttagcagttagaatctaaagggagtgccggattccttggtcaagtgagagaaagatgatgaaatagagcagacacgtcacctgtaaaaggctaccagaggtgggcagtatctgatgatggcatggggttgaggcctttgaagaatcaacaaaaatgcttcataaaaattaattaacttcaaagatcagcttggcccaaggaaacaaagccatcttttctgttctctgccctctgcttcctcccttctttttaacccagaaggcagtagaaacaaaagttaataggaaaagagttgaggtcagccgggcacggtggctcacgcctgtagtcccagcactctgggaggctgaggcaggtggatcacctgaggtcaggagtttgagaccagcctggccaacatggcaaaaacctgtctccactgaaaatacaaaaattagccaggcgtggtggtgggtgcctgtaatcccagctgctccagaggctgaggcaggagaattgcttgaacctgggaggcagaggttgcagtgagccaagattgtgcccactgcactccagcctgggcgacagtgtgagactctgtctcaaaaaaataaaagagttgaggtaaaggaggaaggatgaccacaccccactttcccaactttccacctatgaaaagcaccagctggcaaaggggaaaggctttaacttcaaaacaaacatgtttgaagtttaaattattatatagtaatcaacattctaaattttgtgaaatactgtatctagtgacttaaagtatctttaagacacttcatttcctaagcatgaccagtaaagtcatggactgctcagaacttttttaagaagcagggaagaatgcctttctctaaacgcttttcttcgggggatgatgggagacaaaattaagttgctttgttccatcccatgagttgtgtctgttgcatgtaggtgtaataccctcagatgcccgactgaggttatcctgccaacccaccagtctgcacttctgatcttgccagtctggtaactgctctcagagcgtggtgctaataagacctggaaggtgagatcccaggattctaaagactagtcagttatctgcaatgtacattttgcaatgtgaactgagcaggagaatagggttgggtcagggcattcagagggaagataagctcaaagtgggtgcccttcctattgccttggggcctgacaaaaattatttcccatgctcactggaaacaaagtttgaagttaatatcctttactagggtttccagatcaaccttgccatccaataaaaatacaggacactctgtatttaagtataagcatgttctaaatatcacatggaaattcatactacaaaattagtcattgtttacgtgaaattccaatttcactgggtgtcctgaattttaactggaagccctaagcgaatcctctccctcttctgcataataggatcacatttataccattatttctttaaaaatgcccagtgctggagccatcaatatctgcaatgatcccagtctccacatcaacatttggcatacgttgtctgatacccatcaagagaacagtttaaagtgtttaaattgaggccggccgtggtggctcatgcctgtaatctcagcactttgggaggccaaggcgggcggatcacgaggtcaggagatcgagaccatccctggccaacatggtgaaaccctgtctctactaaaatacaaaaaaaaaaaaagaaaattagccgggcatggtggagcacgcctgtagtcccagctacgcgggaggctgaggcaggggaatcgcttgaacccgggaggcagaggttgcagtgagccgagatcgcgccactgcactccagtctggcgacagagcaagactctgtctcaaaaaaaaaagtgtttaaactgaaaccatccgagaatttcaggcctgtgatccttttaccactgccctttacacgaaacagtggtcaaacaccaataactgttcttgagtaacttttctgccaagctggaaaacttccagccgtgtggtcttggacaagccacttcacctccctgagttctcatcacctgtaaattgataataataaactcctaatgagaaccaaataagctaatgaaggggaattagcatgcaacaccataaaagtccttacaaatgtcactacatagcaatagtgtaggaaccaatatgtctatattttaaattttttgctgttggtattcagtttacacacagaaacacgcaaatgcatgaaaattactttttaaggtaacatacaactccagaggacctgactccctgaggacagccatggctattagaaccaccacagaactccaattaatcagttcagatgccttctccatggaatgcttttccagaaccccctctaagtatccagaccttttaaatccccctgtcttttcctttggctgccaactctaggatggggcacacaacctgagaaagatctcaaagatgatgagaaaagaggaagaaagagtgggtgaagaaaagctgcagatcagagctcaatatgcagccctcaatggtgcaccttcccctcacctagaagcagtgcaagtggttaatagccactattcttggggagctggcaattctccacactcctcaggccagtacagactaagccactggagcaaggcaggcctgtctttctaggtgacactgctgctgtgcaccgagacccctgggatggcttccagaagttcattctcactggtttcagcactcattctacatttgcttcttccaagttcctggcagcctgtctttacttccttattaattcattcatttttgctgttgtttttgttgttccggctaacaagacttaagaaaagcccatttgatcttaatttcgtgttgctcattatcagttctcttttaatcgttttcttatgatcttcatcaaaaaagttacctgtaaaacccaggaagaaaagtccttcatatctccccgccctccccttcttctttctctatctcttttgatgacaaagtggcaagtgactttccagagagctttaggaaatctaaccaaatgacaaaatagttgtgtgatgtccaatatactgaataaatgtcttacagaaaaacctttagcaaaaagcctggggaggaaggtaacggcattttaaaaaatcagaagctcagaggagacaaacactgcttgatgagcacttgagatgaatactacaagctaatgcgagcaatcagcaggtttgtggagaatatgctgatatctgcagaaaaaaaatgcagtggcagagaagagcttacagataaacacaggagctcaaaaatatatatattattgctagaaaaaccttgacattttgaccatcttttatgttgcaactagaagggaaatacagagtccagttcttacaactgaatatccttctggtaatgaattcattctaaatgttgtttcagaactcctctacatcatgcttcatcacatagcaaattagccaggcaacccctcattaataagaatagttaaccataagaaccaacaagaaacatacattaataacatttaaaaatttaaatcagggattcaacacaggaaggtaactcaattcaggatccatatttgttaccttctgttgagcattctcactactgactccctcagcctcactggggttccagttgtcagccccccttattggcaaaggagctgtctattggactgtccaagtggtatagggctcatcttttcacgcctctcaggagctcctctgtggatgtttcttgtaaagcctgcatttctttctttccttctgcagaaagcctgaacagttcaaaacacctccacttaaatgtgtgcgcccattcacccatcccaaatggcatatagtcttttagtgaacctcagctgaaatgaacaaaaaagaaaatttaagttcacaccttcatgcaaaaaaaaagaaaaaatcatactttgtgcttatagagatggtaatgaaagatatgatttaatagatgtttattggatgttgacactcacccatcccaggataagagttcttcaaggcctgctatccagtgatcggtgatcaccttaccgttagtttattggctctgactcgccaggtatcaataataaagcaacaaatattctgaccctcaagcatgactcatttatacttttaattaaggtttaacatggtgaaacaggtaaatttgtttaaaagtgaacttgaggccaggtgtggtggctcacgcctgtaatctcagcactttgggaggccgaggcgggtggatcacaaggtcaggagatcgagaccatcctggctaacacagtgaaaccctgtctctactaaaaatacaaaaaactagccgggtgtgttggcatgcacctgtaatcccagctactcgggaggctgaggcaggagaattgcttaaatccgggaggtggaggttccagtgagccgagactgtgccactgcactccagcctggacaacagagcgagactcagtctcaaaaaaaaaaagaacttgaactgtttcgattcttcagtcattactgaatcactaaaaataacgtgatggatgccaggatacactgtctaaatccctcactgaagaatgtagaccccaacctcctgccgtgatgggagtgttaagctggagctaccagcctctatacggattgacttagctaaagaaagcccgaggttgtatccgcattctaggtggcccacatctgatgaccaatcaacccaggagaacaaaggcctggcccgctagtttcaactcagcacagctctgaaaggtcatgctagtttcagactttcatcaagttgagttctgtctcctttgagactgacatactttgacttcaatcctctgcccagttttactgccctcccttcccgtctaagggtgttgatctcaagagcgcttcctcattatctttctgcatgcatatcttcatttcagagtctgccttctggagaacccaaacttcagtagctacttcagtttgttttagactattggcttaacacacagagacctagtgagtttctttattagcccaggatctatgaagaatgtgctaaataatactctttccctccaaaaacatcatacaaattgttcgtagttttatccagaaaacagaagcctcttgaggagagagtagtggagaatgagtttggtaagagaagaggagtctagaataaaaatgcctgtgtaatgagggcagaagtgagactagtaggaaagtagacatatgcataagatatttccttcaactacctaaataattgttgataaccctgccattttacttcctgcaatggaatgaggtctctactaatggctaccctttgggagttcttatagtttttttttaatatgtcccagaaaatttaaccaatgcccattttcttaaaaaaaaaaatctatcctatttcttgcttgtgtttctgtctaaaaattacattggtgtaagtgtgggtgtgagtgagggcatgtgagggggaggctttatttatattgtgtctttcagagcctacagctacttctaattgaagcacaataataaatatgactagatcaaagaaatgttaatattatctgtggagcttccttatttagactttgaaacactcattaattttctttgattcatattcagaatatcaaatcaagatctaaaggaaataggctggagtggtggctcatgcttgtaatcccagcactttgggaggccgaagcaggtggatcctttgaggtcaggagttcgagaccagcctggccaactggtgaaaccccatctctactaaaaatatttaaaaaaaaaaaaattagccagacatggtggtacgcacctgtagtaccagctacttgggaagctgaggcaggagaatcgcttgaacccgggaggtggaggctgcagtgagccaagattgtgccacttcactctagcctgggtgacagagtgagacgtctcaaaaaaaaaaaaaaaaaagatataagggaaatagccataaatctattcatagataaattgcaatctggatggaggaaagaggagggaatgaaacttacccctaaaggcagttaaatatttcataagggatgcaggagccatgggctttttcaccttttaccatttgtgaaagccagtttttccagtattgcaggaaaaatcactacactagttagcataaaaggaaaacagaagagaatttcaccaagcctgtcaactgagagagtcactgaagccagcaaagattattcatgttcaacctgcagaccttttagaggacatcaaagatcaaaggtttacccaggaatgttttcctggaaagagtgtctttaattgttttaaaaaaatgtattgaacaatatgtgttctggaattgaactttggaataactcatcactattttaaattagtggtcattcctctattccttgttatttccaagcttagtatctgattcctaattccagtagagtccagaattaggcaactgctttttatgatgtcctgtttgtaggctagctttctgcatcccactgcttctactagattgacaagatgaggcaccttagatccactgtggaagtatatgtaccacatgggcttctattaaggcatgagtatagaaaggggaaatggcccaaaccagagagttgcacagagttttggcatccacaaactcagtgcagaggaggaaggattgatcaaatgagcttatttggttcccttcttttctccttcctccctctttccatcttttctccctctggcttttaaccctggttgtgaaacaaaattaccaattcagtttttttatttgcctttttaatgtttttaagaatgcctgtgcccaagcactgaaacaatttctgggaatggagcctgaacagctttatttgtaaaaagcaccacaggcaattctacagcagggccagatttgagaagcacagagctcctctatccaaaagtaaagcaccagtggacaagaggaccaaatgggacgtgcccagctgtaggctcaaccacaaattgtcatccatctccattaagtgataccacagaatttgtataccacctctcagagtcattattaacttcccaagaatgccacagtgttctgagggacgcagatacatgccaccaacatatgagaacattcttggtgaaatacgatttggggttcttggttcttctggggtttctgaagtctttatgacacagcaaagtctgtgctacggggacactattaactccttagtaactggttatcttagagttgcatatttctgttataaatctcaacaattatgatgaaataatttcataacacatttcaaaagtgtccacccttctttccctttagcagttcatgttaatttttaagtagtgaccctttacaatttctcacccaaatctggccttttggaaacagagctataaacggatacactgtggatggagttttactggcaaaaggcattttttaaaaattcccatatgttcctttaagtgattttttttgttctctgaaaccaaaaagcatatgttgaatgattttttcctcacactaatatgtcgtttcagacccttaccaggtctcttaaatcttttcactttcttcttttttcatctacctacaaggcaacttatgtgtagtccatgacttgatctcttttatttcctttgtatgaggagaaattgtgcctggatggaaaatcatgagtcttcctctctctgagcactcttgactctcctgtcttggggcatcattctttgtaatatagatttttttttcataatttcccacagttgccatagacagatgcaaaatgaaaagagggtattgattctctttcttttgtggggcatagactctttcagataacttcagttagaaaaaacaggatgtaagcgtgtgtgtgtgtgtgtgtgtgtgtgtgtgtgtgtgtatcagtgttggttctcaaccctgatttttcttttggagtaaatcagtgttggacccaaaaagcaaaaccaaatagaataaacaaaatgaataaactaacaattacctaatagctaagaacatgaactctgtaatcacatgaggtcacataacatgtataagtttgaaaatacctatttggaaaaatctggtgaaaacttggttctaatttagaagcagtagttctaatgagttttgtgtataagaaataggtgtgtcttagtccatattttatgacatagccattgttgtctagagcctcgtgaaactcactttccatcatgtccgctaaaaccattccctacttcttacaccatgtcagaccttccttgtgttgttcaagggatcttatatttctatttctaagttacaggtaaatcacgatgcttgctggtatctcttcacagatgttccactgccacatcaattcagcatataacacagtgaactgattacatactcccttaattttacttcctagatacttgtcaacctgtctctccccttctctacttttaatgcctttgtttggatttttataatgtctcatttgctctattgcaaatgcttctggcttagtttttctgtctctagtctcttaccctccaaatctattctccgcctgtgtgagccatctgaaaaaggcaaattcactatgatactttttcttgtcaatttttcagtgtctcagtcgcctttttagcagaacatataagaatttggatggccccactctcgactcgacttctctaggcaaatctaaccatccctgattcagacgctaggcttctgacttctcacacatctcaggctttttcctgcctctactcctggcttgcttctgcctccacctgggatgctgtttttttcttcttcagttgattagttggcgttcatttttcaggactgaacacaggtttcagccttcctgtgggtctgggcttgttacttctttaaccctccaaggcctcctgaagatttctctgtgcagcacttgccacattaaatcgtatggtatttgtgtcccaacgcactaattttaatgttgagaacagagccttgacaacttcatcttgccacccctatcatgaagctacaagtatatgctcaataaaaactttgcaaatgcttaatccagaaggaaacttacagattaactagtagaatgactttatttcaaaaattggggaactggctaggcgcagtggctcatgcttgtaatcccatcactttaggaggccgaggcaggcggatcacctgaggtcagaagttcaagaccagcctgaccaacatggagaaaccccgtctctattaaaaatgcaaaattagctgggtgtggtggcgcatgcctttaatcccagctactcgggaggctgaggcaggagaattgcttgaacccaggaggcagaggttgccatgagccaagatcgcaccattgcactccagcctgggcaacgagagcaaaactccatctcaaaaaaaaaaaaaaaaaaattgggaaactaagactgggcatggtggctcatgactattatcccggcactttgggaggccaaggagggagaactgcttgaggccaggagttcacgatcagcctaggcaacatagcaagacctaattgctaccaacaaaacaaaaacaatgggaaactaacatacaagaaactgaaataacatgtcagaggctaaatgtgaatttgtagctgagttgaaactagggcccagatatccccattgccttctgacacattttattttgagttgtataatttggcgtattcatgagaaacattgttaattggattatattaatttcccctaattaggtttgcttgggaaattgcagagatgctcagttctttcctgttcacagtgacccaagagcttgatacttttcagccattggccatttcatcctgcatctattctgctcttaatggtactctaaatagcttattttgcaatcttaaaaatctcatgcattatgtcagtagagatgtttgtttgtttatttatttattttttgagacgaagtctccttctgtcacccaggctggagtgcaatggcactatcttggctcactgcaacctctgcctcccgggttcaagcgattctcccacctcggcctcctgaatagctgggattacaggtgctcaccaccacacccggataatttttgtatttttattagagacggggtttcaccttgttggccaggctggtctcaaactcctgacctcaggtgatctacccgcctcggcctcccaaagtgctgggattacaggtgtaagttaccgcgcccggctgcaataaagatgtttctataagccaaactcattgtaattctgtgtgatacattaattcagatggtataaatgtttgctaactaaaatcaatatccagagatggaattcaagaagtgtcatctgagttgggaaaaaaatagtgcaactgatattttggtacaacttagccatggcttaacccatctcaatacagccacatgattcttctcctagcatagctactgagggaagaggaatataaagaattctctacttctcatactggttacagggcatgatattctttaactttgtagattgcgagatataagcttgtgtcttggttatatgttgcattattgtcacaaatttgtgataacgtcctgtatcttctccctgttttacctctgtgattaaaatatttttcaaacgtgcactctctccctgtcacctccatgggaagagcattttcttgcaccattaagccttgtgcttggccacaggacataacttggtcaatggaatgtcagcagatataatgtaaacacaggctttaaatgccttgatctcttatgctttaccattgccatggaaagacctttctctgcgtagctgttatttcctcacccttgttctaggaggagcacacgtgcaaagacctagaccaacctgcatcaaggagccgagcctaactaggcctcagattgaagcagtttcccagacaagcccaacccagatcaaccaaccactaagtgacccacagaggcaagaattgatacatttaagtcattgacttttgagtgatttgttttacagccagctgattcaactcctccctaataggctacttaattaaaaaaccttaagccttttgcataattgatcctaggacacttgcttctcctgctggtcttcacttccttctcttttgctgctgtcttaggctttttgaagtcctgtttaactttagatacctgtgcttgtgttcttttaagttgcttttcttcaatttctttttcttttcttgctcctttacctgatctgctacttctcctggaatctttttctttatgttatattttatttctgcttttatcttttgctgcccctctaaatgtctttaatttataatttctctccccttatgtgcctgatgctgctcattctgggctcttctttttgtttctgcctctacccaattcttgtgggatgatgtcccagctacatcctgctgttctttcacctgctctattcctccagaagcagaaaggcagacttaacaaatgatctgaaatcctccccttgaaaattccaatttgctttctggctccaatggcccacccacccccaggtgctctgggatggagcttattaattacactcccttcagactaccctgacttgaacagagggaaggaaagagagaaagtcgatagggaaggtgagagaaggaagaacttgggaatcttattaatggtatctttgttttctgaaatgagaattggagaaaacaaggcatacggtgcattcattgttttagaactgagaaacaagctcctattcgtcttgccaaaaattgcaaatgtgtgtgattcctctccattagctcacagcaatattggaaatgtatttgactaaactggaacacaccatcagcccaagatgcccagaggcagctcaatacagccatccatatgcttctctgagttaatttggaatacagagaattcagtttccaaactgtccccatgaacatttgtaaaatcctgcccatgtgagtggaaggtgatctgtaccaccacatgcaagctctcaataatgccggaggactgtgtcatgatagaatgcaaaggaacgacgggaggtattgagacctgcaactcttaactgctactgttttcattggtttaaacatattgctttatagaatttctgatttctcaatgctttattaaaggatcagcaggggttaggcagttgtagtgtaaattatataattgcagccaccacaaatgtatataatggccctcggtcgcttaccagccctctcaggggatacagattgaccatagttactcaactcacaggcaggaagtcccagaacatgctattacttccttctatagcatcatagtctgtgcattcttctacagattatcccaggcaatgaattgcatttaatattgctgtgggtaatatttcttcttctgtctcccttttgctagcactcctggaaatagctgaagcacagtacaaatacttacattgcaaaattatgttaagaatttcacttaacgtaaactgctccctagctcatatatcaaacatgaagtgggtagattgaacttccgtttgctgggcaacctcagtatgttacccatctacttctcccacaaccgttgccactttatctcttcccttcctggacacgatcttagttgcctagagcaccacaaactgcaaggcttaaaataacagaaatgtattctctcagtttaggaggccaaaagttgaaatcaaggtgttggcagggttgattccttgcagaggctctgagggagaattcattccttgcttctcttctagcttctgatggccgtcggcaaccctaggtgttcctggacttgtggctgtgtaactcccatctccgccttagacttcacatggccctctcctctgtctgtttcttctccttttctttctcttacaggggcacttaccactgggtctaggatccatccagagatgcatccaggatgatctatcttagcataataacatctgcaaaggccctttttccaaacacagcagcagtcacaggttccaggtgggcatattatgggagaccaccattcaacctactacaggcatcttgtgtaggcaccctgcctgcagctctcagtattctctgcatttaccgtgtgctttggatttggagttgaccagaaatatctcctcacctccactgcagcctgttctccaacctctaaatcggtgttggcagtggaaaaccactggaccagtaaaaataattgcgtttctggcctggctgtggcctcatgcagaaggcagaagagaagccagatgctctttctcatttcaggctattcagatgactgggactttcactgactcacttcatcttgtgcttttctttttatgtcttttagccaaaaatctttttttttttttttttttttttttgcccccagtgagcaaagtccactctgccctctcagtctgccaatacccatggatcatgattgctattttgcaatcctaagagactcatgtcagtctgtacagctaagagcacactgctcattcatggagagcctgctatatgtatgtaccagacactgcacatgatgtgaattgtgccttatttagtccttgtaacaaacctttagggtagatagcaatgcttcattttacaggtgaaataactgagtctcaaagaagttacctgcctcccccaaaaaatgcccaaagataacacaatggcagagtcacgattggaagcctgccctctgattctgccaccaagctgtgtccattggcatccagcttcctctgcacatcatttaatcacttgctaatttggcatatatgctctggccattttttatacctatggttttctgaccaaggttgttaataaacaccctgcatgcttgccaagcacctacctggtgcctagtctattcttctacttccagttggtgtgcatgaaggaccctatagttattttagtagagtaggtgctggtcacagtcccatgggagtgaatatgccagctagcatccctctgatgttctcttgtgattaattacctgtgactctgattattccctcactgtgaccccctcggcacttacatgctaaggttgtgcagtattcatttgttcttgtggaaatatggctctgtaattgcttctaaacaattttatttatgcatctgttgtaggcagagatctaaatctagcaatttaagccattactagatgatgtctataaggctccgagcaaattcccgggagctgggcacgtagtggggattgggcatcctagatcaacatgcatttgtgtgtatgtctgcataacaaagcaccttttaatgcaggtcagggcttttttcttgtatttattccctagttctccatcctcctaccaccacccggcaacacacatgttgcagtactgcccacagggagctaacataatggtgaccgactggtggagtcgattttcatacagattttgagaaagaagcagatatccaagccacagcacactatgggttcatttgctaccttagtaaataaaacccgtggctttaattccaagaggagttagtcttgtttcaaattatagaatacagccaatacagctatagcatgagccatgccggctcatgattgttacctcttggctgttgcccaaatctgaacattgtcttgtccccaagactttacttctggcctggttagaaaaatgttctaatctaattgtctgcctctattgcgtcgactcttctgggagataatggtccctgatgctgttccacatcctcacttttagctaactttgcataatgcacattacattatctctgtcttctcccattaaggcctgcaaaatcatgggcgattgattaaggctgagactaggctagaaatttcttttgcaatgaagctctttcaggagtaacattttttaaaaaacatattcataggacacgtagcaaaataaatgagactgcagacctccacgttctgcggaagaaatgctctgctgccactaaagctttagctattcatcaggggcaatggaattagagtcacagacgttccaatattgtaagagagaatgaatagaaacgatggctctgttgttttcttgtagtcgtttttaaaatggtctgtagaatgtgcctctgggcagaaaggaatgaatgcaaaaaagagaaaattttacacatttctgttaaacatcttaggcttctggctatagaaaataggacagcttcttttgagagaagtgtgtctagtgcattttcccatcacttactaataaaacaggacagacagactgacaggctgcctgaaaagcagcctcacagtggaaggacagcatgatcacacatttcagcctgggcacgggagccaagagactgtcatttaataagtggatgaagaaatcattttccctgtggcaaaaagggagagaaatattcagctgcatctctagacctctatcaggttaaaatgaatatgttaagagaattaagctgcacctcctttattagtgtgacagtaccctggctagttggctatattaaaatggcagacacagtgaccctgttgaactcttcatgttgataggcagtcagaaaataatggctttatagttctgcatctgctcagatctttccagatttgctaaaatttccaacgtctttgtctacttattatgacagcttgttctctcctgattggggtctttattggcatgtgagcatggcagcattatattttggcatgtctgtgtaatactgcagaaatcaccttacttcaaacttatttcggtgcctgtccttcctgccttgaaaaaggtggatagcagtataatgcttagacatcaaaccttcattttttctctccctatgaactctaaaatcattttaattgaaacaagaaggtttttgccccctgcattagcatgtggtgttttttctttgtatcaatcaccacattaagaattttaagatatcatcccattaaagctttacaataaccatgaaagctatttataatgacctattccactgataagaggacggaggcttccagaagttaatctggcataaggccacttggctgggattcgaatccagtcttttttgacttcgaaatgtttgtggttccacccactctaaggctgccttcacacagtggaacttgcctcttagtgaccctgttgaaaagaatgtaggagggtggaaagtctgaccgtgttatcttaaaattgataagttggctgaatacagaggcatagtgactgataatccaaatggcatggattgctgacctgctgctgtcatggctcaatagagccacttactatttttgactgcaccttacacctatgggagcaggtggtgtgaatgagagatgggaagaaggggtaaactttctttctaaagtaggattatatcaataacccagactcacaggtgtaacttgctgcttttcagttgtccgcaggaaaaccagtgtaagtcagttcattcctgctgtgtgatcttgaaaagtcaccttaattaccttaattacttccatattctgttggaagaaaagaaaatgaatgtaaagcacctaacgtcatgccaaacaaataggaaacactcaacaaatggtagatttagatgattctcttcttgtctgttatctattctattatccatttgttattcctagaagtgaaaataagtattacacctttgttgataattttctcccataaccagttcccctggttactcccattgcttgctgtgtttcctagcttctaaaacacatatttttttccacatttggaaaatcctggaattgcaattcattttataattggagtaaagggaagcatgccagctctccagaatggcatcacctgtgaaggtgtgctccaagccacatgttcaaggtatctcttcttctgattgtcaactcaggtgagctatttgcattggcaataccacatacatctaaattttaacgtaaattggaatcactacctattgctcagtataccacatgccctgttacaataaaaaagtattgtatacaaaaaggattgtcatgggagtgaaaatccaattaaagacagtagacataaagaattgcaaagctcgaggagattgatatatcttaaagaaccaggactcagatactcttggttttgataacatacagaataatgggtgttaacttttttattaagtttctaagatctctgccaaactaatatattcatgcctctattcaagagaaaaaaaaattcctgccagataattcttacttcttgctttaaaaataaaattctgcatacttctgtttttagcacattccctgttcctctgaggtaactttgtctctgctttgctgagatgctttctgatcccatttgtggtgtgtgcagggtatggggaatggcccctaaacatgccttccctgaattcctcatttgctactgactttcctctatcccgaaagggtagccaaggtgaaggcctcgtggttctgaggagacgacagcacccaatctgcaccaagttctactcaaaacacaggcatgctcatgtcatcagaatatcgaaatgcagaccaggatggaagagcttttgaagaaggagtgtaagatcgcatccccaacctgagtgaattcaccccctctccatgtgaagagagagagaaacttctgcacactgttaacctagatgtgaaagaggaattttcagagatgaaaaaccatttccaggttttcacagggtcaagttggtaaggtgggaatttctagtttttcaggaaaaatctagagtagtggtcacaaaaggtatgttgtcctctcgatgcctcagggtgagagggaggacaccttcatcagagctgagagagggactcccgtggggatgtgtccatggagatttctagatggcacccagagatcatctgtgattgagccggcactcgatactagcagcacaagaacccagaccagtgaaagtatgagcagaagaggccagccaagaagtgaccacaggccacacactaccacacccaccatggtccaagggcctgtgtcggactgaggagtgtcctgctctttcccaattccactttgaagccctcacacacaaaaacagacatttatccctccctgccactgccagatgacagttgcaaaattagaaatcggactcggggaagaaggcagggaggtacctgtgagaagcatgagggagccctgagatgcacattatgagctgcagtgtaaaagtataataatatattaattccagtgaaactcccaagagagactgtattaaaccaggagtgactgaaaacaaatttggttactaaatgaaataaataagctgttggttccaggcagatcgtaggccaaagtggaaagctggtatttgttatgagtaaaagtgagggcagcctcctaggtatacacccctggtgggtggagtttgtctctcactccatcagttccccattcttttttttttttttttttttttgagacagagtctcactctgtcacccgggcctggagtgcagtggtgtgatctcggcccactgcgccctctgtctcctgggttcaagtgattctcgtgcctcagcctccctagtagctgggattacaggtgtatgccacgacacccagctaatttttgtatttttagtagagacagggttttgccatgttggccaggctggtcttgaactcttgacctcaagtgatccacccgcctcggcctcccaaagtgctaggattataggcgtgagccaccgtgcccagccagttccccattctttatgataacgtacagtcatatcaaagaagaagttcaaagaagagttcctttacatttgggctgaaacctactcttggaccttcacctggtagctcattagtgttaacctaagaaccctgtttttcacctcagcaggcctgttactctggtaaacgccccaggacatgactgctctgtctgcccttccatacctctagacgctggcttggattgttcttcaccctgaattgcctggttctaactttaattccatctcaaattggatttcctctcttgcctctatacaatcttctctaccatccctcgtgctagtaaaactcttcttccagttctaactagtgttgataggcccatatggtattctgggctttgtcactgaaaatcctgaaattctttgcttcagtcatttgcagtgattcaggtttatggagcttctcatgttacacatggctactagagtggtgtacccatatggggttcaatttcctaactcccttctccctgactgctaatgcttttccttctgttcaggctgggcacttcagatctcaaacacaatttgttagtatccatctccttagctatggtagaacagtgacttctccagggatgtttctgagttcgagactaatgttccatttaccacatctcaagatcctgttcctgttttgcggaataatccctgctgcactgtttttattttgtttttttcaagttaccaggctttgtgctctttttccctgtagtttttctcccatgtttatctattgtttcctacgaatatatgctgagagtcagtgggcctagtgtgcataattcaaatgtggttcgacagcacagggacacaacagacatgattagatcattcatgtttagatcaggaaggatgggggaaaaatttgatttggggcttggggagcacagttaacgtttttccaggatagccaaggaggatttatagtaatttttaaaaattgtgtcaggccaataaagtttatgaactagatcccgtcacaaaacttagattgaaaactcatccaacaatggctaatagctggaaagaaaatggttgccctatgtttcaaaacaaaagtagagattcagttgaactgataaatatgaatgtgtttatacagacaggtgaacataagttttcagattgggggaaaatgcaaagtatacacatcccatatattcatggccagagaattctatcttgttcatcattcattcatttcataaatagtaggtataggcatatcaactacgtgccaggcactgtgataagccctggggctacagaaataggagacatggcttttggtctcttactaggaaacagaatagcttcaggctgtgtagtgcaaccatggtcttctgtgctggttgtgttaggtagggaaggtgggggtggagaggaagttcagggaaggctttctggaaataatgatagctgactgaatattgaagggtggggacagggttttaggaacaaagaacaattgatgcaggcatggaaaacaagcatggaacataccacatatggaacatgtgggtgtagaagggaggatgagtgaaacagggcaggtaggatgggcacagatcgagatggggggtttttgatgtgttaagagattcagattagttctctgatgtctctagaaggccatcattagtcttttttttttttttttttttttggtggggtgtatttcaaatactgaaaaagtcctttgggctcttggggctccccacactcatggttcctttccccacaactcactgccctcctcccaacagaaaatctatttcgaggacagtatgctttttaaatgaataactaacattgtgttctcagctaactgcagaaccagaggagctgtttgcatctgtctatgcagattgagtttctttaatctcacaccaggcctccagccacatggaaacaaggcagttatctgcaaagctgaactagatctcatctctagtggactccacttccccctctcatatttatcccacaccagcctcatggttaagaaggaccgtcaggaatgtttttatcaactccaagctctaattcatattcctccaagtctctcaccccaccctcccaaccctgcccccaagatttcattgagatttctcccaacagttatttggaaaaaaggtaaaacaaaacatgttcaaggtcttggtgcttagcccaaggggctccatgtgctgggacactgatgggcaggggcttctgcctctctaacccatgcccaagccacctcctgacccctggctgcaaaagatgggaggggcagaagccatcacaggacttgtaactgcccaatgggctcaccttacccggtgcctagacagagctgatttatcaagacaggggacttgcaacagagaaagagtaaaattctcagagccggctgtgcggagacaggagttttattattcaaatcagttttgcccaagcattccaggatcagagattttaaggataatttggcgggtggaggaaggccagtgagtcaagagtgctgattggttggctggagatgaaaccatagggaactgaagctgtcctcttgcactgagtcagtcagttccagggtgagccacaagatcacatgagccagcttatcaatctgagtggtgccagctgatccatcaagcaaactatctcaagcactgatcttagaagaagtttagggagggtgagaatcttgtagcctcaggccgcatgactcctaaaccgtaatttctcatcttgtggctaatctgttagtcctacaaaggcattccagtccctaagcaagaaggaggtttgttttgggaaagggctgctatcgtctttgttttaaactatcaactataaactacgttcttcccaaagttggttcagcctacacccagtaataaacaaagacagcttggaggttagaggcaagatggagttggttaagtcagatctctttcattgtctcagttacaattttgcaatggcgatttcagacccagaggatcagcatctcaggatctggcagagccccgggcaggatcattcagcttggccacccgctggcttgctggtgatgagtgaggattttctgggcagatcctgtgtggtggggatgtggtcaccagtcatcaggttcttgtctggttgtgcacttggcagctgcttattctcctatttggctttggccatgttgtagtctcctgaggcaaagtactttttcccttttcggagtcccttcataaggaagctgggcccccaggcctttgtcctaggcttggatatttggcctttagcttttccttctccactgtctcagggagagtacattctttctcccgcatgccctgcttcttcttgcctgtctcctccacggtgttctcgtttagtttctgggacattgtgggactgggacaatagagtataggaggtccaggaagtcaaccaactgagaggtggggaggggaaacgggacatcctgcgatgctgctttggtccctgtcaatagggttgctcctcatcagtcatcttaagcagggcgtggtctaaacgaatcttcattccagatagctgaggcagaggcagggaggctggtaggagactgccgttgtgatctaagcaggaaatgatgaaatgatggcaaggctgaatccaagcagttctccaggacagaaggacactcagaagatatgtgactgcatggagatgggggacaaggcagggcagtgctttggatatggcccagtttccaagcttgtgaaactaagtgggttatgtcccattcactgagttaagaaggaacgaatgagtgtggggtggaagagaatgaagttttttcctgaatgtgtttgtgttggggtttgttataatgagtctcagggtctggggccatcaaagaagggatgatcatgttgcttctggagcataagagagaaaaacccaggttggatatttagatcattggaggaaaaaaataaaagggcaattacaacatcttgttagttaacctctcttgccccttgcctcctggtctgcagactgaattgtaatggctcctacctcaggcagtaataggacaaactgagataacaatatgtcagctatgaagaacacacctgtgcaatgtgcaatgactgctgcttattattaatattgttattaatttgttgaaggtggaagaagcacttagactattcatgtaatttatttctaaatttaaatttaaatgacagttcctagagctacttacagagactccagagagaacccaccttctcagaggttcccctgtcatcacccaaccaagtggacaaaaagctgttagagtcaccaagctgtttttttgtttgtttgtttgtttgtttacatcattgccggttagatggcatctttaatgtcagggcagactcacacataactaaggcagtgctataaggagtagaaataataactgaaaatgtgttatcaagcagtagatgagtctcaggattctgggaacatatggttggtattggtttgactttagagaaggtcacagaaaaaaagttttgtggactccccggtgataactgggggcctgggggagagaggcagtgaacatcatctggcccagaagggaatgttctgggtcacaggcagttcctgaggatacttggggatgtcactttgttcatgctgttctaaaagtcaaggtggatgttgggctgaacttttaggctgcattcacgtgattggggtagaacattttaacacattgccgtttgctctcattgagtcatgtgcatttgttcattcttagtctcttctctctatttcaaattatttcttcccacctgtttggaacaacatcagcattgcatattggcctcaaatgagttaagattcctaagttcctaactagccatagcacaaggtttttcagcttgactggtctcaaggcttttctcagaatccatcgattcttccagaaaactttgctcaggacatgcagattgcaataatttgttttccccaaaatgtattaagaattatttatttaaaaatataaaaacttcctctaaacagtttgagaatctcattgctgaaaatatataaaatgggtacacaattaatttctctccagatgtgatactataactagtaacttatttaaagttgaaagagaataatttgcatctggaggaaggtgttgtaaatgcaagttctggtcctttcatgttcctgatgtctttggaatttgtctttgtctttagagtagtgctgttttggactcagctccaatacagatgacttccacgctccccttggactgattaagtgaaaatgagagaatgaaataatattatccaggagattcacataccccaccaagccacgcagaatgtacttttaatacataggggtagtttagacacctcaagtctgtatggatacctcagggtttaattgggttttgtggtgatgccccaagagcttcatgccatttttagatatatttgttcaaaaacagatcaataattgatttagatgtgggaggtaaagatagatgcgcactaactgtggatgggctctgcagtgagaaggcagtgctggggctgctaatggtggctcaggtggatgcacactgaaggggaaggaccaggggatggggcgaggcattgctgtcattcgtcttgaacggaacagttgtttcattctgaaagtgcttgagaatatactctttggtgctttgagtttggctaatggttcatagtctcattgttctgatgaaatgacttcaaactcattgttgtcattattgagaaacaagttctctccaaataagtttgaggagacattctccaaggaaacaatctcttaaatgtgagatatttgtgaactttttccataaaatacagcagtgcccccttatttgtggtttttcttttcacagtttcagttgcctgaagtcaacttgagtccaaaaaatggcattactactcttgcactttggagccatggtgaggtaaaatacgggtgacttgaacacaagcaccatgataccatggcagtggctctgataaccaagacagctcctgaatgactaacagggctggtagcgtctacagtgtggatacactggacacagggacgattcacatctcggggagcaggatggcatgagatttcatcacactactcagaacagtgtgcaatttaaagcttatgacatgtttatttctgcagtttcccatttatttcacaaggcctacgtcatccacctcacttcatctcctcacgttggcacatcacaggaaaaagggtgagcacagtacaataaggtattttgagagagagagaccacattcacataacttttcttacggtgtattgttataattgttctattttattattaattgttgttaatctcttactgtgcctaatttatataaattaaactttatcttaggtatgtatgtatgggaataagcatggtgtatgaagagttcagtactatccttagtttcagatatccactggggatcttggaacatatccttcacagataaaggaactactgtagtgatatcaatgcgttaattctggaaaaatattacatttcagtcttggtgtcaaattctagcaaagaataatttttaggactatgagtaaaccaaggaccaacaatgaagtagattccatgtcactaggaatagaagttttggggatgtgtgttcatgttttcatatgacttgcacctgtctggaaacaaaactgtttctaattatttttaaataactagagttcaatctaatgtaaactatatacaaaagccagatagcaatcactaactttgttacatcataggcatagataattttaatgaaacatatccaccaagtatgtccaatttctctgatgacagtgctaacttacatgcgcatcaaacatttgataaatgaatatgttaatgactgtaatgtcttttctgggaatgcctttgttggggctcaacacattgttaaggagaagaaagcagatgactgagaggaggtttgtaaagtggggatggggagagtagctggaagccatgaacaaattcattctcagaggcacagatccccctacatgagctaggacctatgctaggagctagattcacagatatggggacgctatgggctttgccattcccaagcttcttgtccagtaaaaccacaactcagaaatcttgcttaactaagtttagcaagttatctgcctatctatctatctatctatctatctatctatctatctatcgatgtgtctatgtatctatgtatctatcatctatctgcctatctatctatgtgtctatctatcatctatctactgtctatctctagataaatatatagatatatacacataatgcatagtattcaatagtactatgtgaaaattatgttaaaggagatgtattagtcagggttctctagagggacaaaactaatggatacatatctatatatgaaggggagattattaaggataattgactcactcgatcacaaagtgaagtcccacaataggcggtctggaagctgaggaacaaggaagccaggagtggatcagtctgagtctcaaaacctcaaaagtagggaagccaacagtgcagccttcagtctatggccaaaggctcgagagcccctggcaaaccactggtataagtccaagggtccaacagccaaagaacttggagtctgatgtttgagggcaggaagcatgcagcagaggagaaaggtgagtgccagaagactcagcaagcctgctcattccactttctgcctgccttttctagccatgctggcaggcaattggatggtgcccacccacattgaaggtgggtcttcccctcccagtccactgactcaaatgttaaactcctctagcaacaccctcacagacacacccagaaataatactttgcatcctttaatccaatcaagttgacacttaatattaaccatcacaggagataaatccctggacttcaagagaacctattgtcaccaatcattttaggcatcatttcatatggtgagtagaactgtgctatatattatattatgtgcagaccggggttagaaagctatggcccacagactgaattaggcccactgactgtttttataagtaaagttttattgaaacacagccatgcccatttttaaaatataatgtctccagccgctttctgacaaatagtggcaaacaatgacagagttgagttgttacggtggaaacaacattctccaaagcctacaacattttctctctggccctttacagaaaaagtttgctgatttctggtataggacaatattatataatatgctttcattttaaacattgggcaccactggttaagtcttattttcttccaaacataacaactatatgaaatctaaccctacagagcccaggagcctacacaccactatttagttcttacacctcattgatataagtaatttttaatatcttgttattatttctagaagtctttttggtatggttctttccatatctagcagtttgtgatttttttactttaactgcaatatgtagcagtttgtgagggataaaataaaacccccttttccttctgtttaaatatatggaatgtcagcaaaagcctcctgttagcagtagctgaatctaagaaatgaaccttttatacattggcttacactattttgtccaaagccaaaaatggataatgaaggaggaaaatgacaaacgttctttcctaaagagaagcatccaagtgtagagaagaccacaagtgactataaaacgaggaagccccgtagctaagggattcacaggtaagcccaggacatgtggactgtggaaggccattaatgtgacatgctctgtggtattcagataccttgctgcatgctgggttcggctctagggaattaagaaaagaggaagatggatatggaaaggtcaatggcaatgggtaaagacatggaaaactatttctataaccgtaaaggagactgagttaatttatcttgaaaaataaaaaaggtaagaaatggcttgccgtaatttttctaccatttatatccattatgatacaaaaagtaaacacttgctggttgattgattaaaacatatgtaagatagagagtggcttagtaaaaggtattttagttgcaaagacagaaatacaagaactagtaagtctaacaatgtatctttatgactcttgaactccaacaaagactttaacagcaaggagttagaaaacttaggctgcacatgggtcttgggaatgattggaacaacgttcctagattctgtctggattctctttccagcaatacatgcaaactttcttctctctcctttcagtctgcccctctccttaccgctttgagcatggcagatgatagcttttgaaatttgtatcagttatccttggccacaaaaaaaaaaaaaaaaaaaaaaaaagacatatctcaaactctttttatgatcccagggaacagaaaatcctggggaaaagatgcccaacttgggtcaggcatctgctcttgggcgagtcaccttagtccagtgagtgaggccgtgtggtgatagtgataatatgctgcacctgcattaaccatacagatgaaggaaggaaaacttaatagccaagggaaaactggcagaaatttctaagtgaacactgcattatttctttttggaagaaatcttcactggaaaaaatccagaagaaatagctcagtctgcaacatgaaggatttaggttagaaaaaaatgagattattctgacattagagcttattacacactgggatatgttactgaaagaagcagtaaaatgtcttttcttagaggtttttaaaaatagaattcatttctcatcagttgagatgcaaatagttttcaaaatggattagacacacagaaattttgtttgacgtgcaaactcttgacaaggtcctgcctctttttgccagtaaattcagctcattctagccttttggtacaattcaacaaatatttattaaatgtccactaggtgcaaagcattaggctagagctaaaaggtttatattatgttatggagatttagaaaactgcaaatggggtgggcacgctggctcatgcctgtaatgccagcactttgggatgctgaggtgggcagatcacttgaggtcaggagtttgagaccagcttggccaatatggtgaaaccctgtttctactaaaaatacaaaaattagccaggcatggtggtgcatgcctgtagtcccagctactcaggaggctgaggcaggagaatctcttgaacccaggagatggaggttgcagtgagctgagattgtgccactgcactccagcctgggcaacagaacaagactccataccccacccccccaaaaaaaaattgcaaatgactgtaatatgtggatagttgaggccattgtcacaaaggagatttagatttattgctgtggaattctaaagcatgagagagagtcatgaaagagagaagaagagagagagatgctaacagagaaacaaggaaacacagaattagcaaagtgttagttgatagactgagatttgaaatgctctttggggtaaataggatttcagtaggtagagatgtgtgaaaaggcatttgggacagttacaagtttgtgaacagtgatttggatcatgttcagggaagcagagagtcattcttttaaatggaaacctatggtaccagcagggaagagataacagaaaagattaccaaaaaaaaaaaaaaaaaaaactgggaccatcctctagaaggccttaaatatgctgagtattaagttttgtttgttttgttttaggaagattagtatggtaatgtgaccacccaacaagttcttcctgccccactgcacaaataaagaccacggcattgcggtaaagaaagagtttaattgacgtgaggctggccatgccatacaggagaccaagttactactcatatcaatctcctggaagacttgtaggttaggggtttttcaaaggcagtttggggaagggggtgggtgtggctaaaatggatgcttgctgctgattggctggggcagagatgaaatcatagtgggttgaagctgtcctcttgagctgacttacttctgggtggggcaacagaagcaagagcaaggttggtgggggccaggtggagtcatgggtatcagacctgcaaaaaacctgggaaaatgtctcaaaaggccagtctacaatagtgatgttatctgtaggacagatcttgtgaccagtctatgccttagcagaattcctgcccttctcctagcctgatggcctttcattagctttacaaaggtgattgaattttggggaaagcctattatcatgtaaactataaactaaagttagcttagcctaagaccaggaatgattaagggaaaggcaagatggggggttaaatcagacttgcactgccgtaattttctcactgttataattcttgcaaagtcagttttagtacctctgtgagacatgtcatgccaaggaaagagcagaagttgggaagaagaatttgaaggtcattgcagaaacttatcctgagtcatttaactaggtggtggtagcagaaatggaaagaagaaactatatgggagggagatggtagggaaataacctacagggctgatggattaatgggttttatgtattgtgtactttcaaaacactaagcattaatcaaaaaatagaattctttaatttcctaattccttaaatactagacctttatttacatatacatttaagcctcatatcaaccaaataaataggtcagcctttatccccattttcatataagcaaacagatttagagctcttgaataattagctgaggccatattgctagcaatctgctaagtgggactctgaacccaggatgtctggctctattgctcatgttcttaactacacgcagctcttctctaattgaagtatagagggaaaaggatgagtgtgagaaaacaaggaagtttcaaccctggtggattgagaggtgttccagttatgcattggtacataatagactacccaagacctagtggcttaatacaacaaccattttgttgcagtccgtgattttgtctattagaaacttggacaggcttggctggagaagtctattatacaagacatggacaaaggacactcagtgccattcagctggcagatgggctagtctagaaggagcaagatagcttcattcccaggtctggcaccttggtggggatgactgaaagtctgggttcagctggaatgaaaaccagagccctgcatgtggcatcttcagcaactgggtctcaggcagtcagtggattatttttgcctgttttgggactttatgtaaatgaaatcatatggtgtgtattggtttctttgactcaatattatggttgtgaaagtcatccatgttgttacatgcagttgtacttcattttcattgcagtattctatcacattatgtaaatatactacattttaattattcattctactactaatggacatttgggtcattcccagtttgagctttaatgaatagggctggtatgaatactcttgtattcatactcttgtatattgggtgaaatatattcgcatttctgtggagttatattcctagcagtagaattgctgagttgcaggatatgcttctgttagctttaactattttctatactgtttttacaaatttgcactcttgccagcagtgtatgagaatttcagttgttccacatccactgttaatatcagaccttgttaattttagccattttagcttttctgacgcgactgttttgatgtagattgaccccaaatcagagtgagggcgtctctctcccactgcatcattctctgcttaactaactctctatgccttcccaagagattatgaaagacgcctgtctgattcttccatttaagtattttcttatcttatagaaatacgtgggatatttctcttaaaattctactgaagctttgaaagaaatggttcaaatggaccttacattcaaataacctctcctgatatttaatcagtgctctttccacatctttcagccaaataacattcacttgcctttgctgtatatgttcttatgtagaaataatagtctcaacatccatcacagtgcattacatgtgggaaatatacttccaggtgaaaacttgttgaattttggatattttgaggattttcagatttagttcaacctcatccaatatgtttcctttctaagtaacagacttaagagtaaatttgggctcagctgccaggaagtgaaagagaaaatgatctgtacatgcagatatggatgtagcagaagatgttttcctaaatcgcaaaatcaaaagaacgatgtctacacaggactcagaggaatgaatgctttgaagtaatttagcaatgtgggaatggtcaaacattttcttctgtaaaatctcctgctctctgccctttcattttttttccgttctcattctttttcttcccaggtctgtgataaggctagataacataaggaagtcacttggcaccgtgtccagcccatagtgcttccggtcctgcttttgatgatgacgatagaggagatagtagtatctccttctttaagatattttcaagtatgaaagtaactgagttagtgtatatgaagtatcttctagaaagtttgacatatagtgatcttcagagcagatgcagaggaagccagacaagagggataaataaagcaggcaagatgatatcgcaagagataagacaaaacttctgtgctctctgcatttgcctttccaagaagctggtagtttaactttccttgggctttctgcaaaaatgttgtgcatctgaacttgagcaattttgagtgtttctcttccttgcaaacaaatgagccttgacttgagcagtccctttagtaggcatgtcatacattatagtagtttttgtgaccctctcatctctccaactggattataaaatcctcaagggcagagatgtctctaatatgtctttgtattctgcctcgtacttagcacaggacgggagaaatgtcatgttatcctgctgattaagtccattaaggattcaggttgcataactctcctaatggggaatggagaataaattctgcaagtgagtttaatgttcacgaaaatcatcaacagcaaatgtagatgcatgccctttggccgtgcacaaaatgcaagggagagggtggtcttttcctaactctttgtgaattaccctcgctaagttctcacctcaggggcagaatgcaatttgttttttctcttatagattttttctcagccttggtgtgaagcctccaactgagttggaagatccaaactgggacagggaatttaaagaggggaccacaaaatcgattccaacagaactttaagtttaccccaggttagcttcatctgttgcacacagaggcatctgcttaacagatcattgtagatatgattgcaaattccacataaagggaatatttataggaaggtctgcctttctgaatacgtaactaaaaattagtttgttttgtaaaactgtactttaggccaaactctgattcactgtattaagagtcccaaactaaccaaatgagagggacatactagcaaagacatcttcatccacatgcgggagggaagagggatactgccaagttcttgcagaaggacagcacggtctctttcagctccttaaatatgttctgatgaggcacttcagtaaaacatgcccatctgcgtgttccactggactaatgaatatgaagtgtatgttcagctattgatctgaattaagtcctaggaccagaatttagtgtcattaatgatctctttaatgaacgcaggcagaaaccattatcaaatgatgattttttttttcatcttggaaagattattttaaatccaaacacattctttcaactctgttttaaccccccagagatatattttaaaagccattgtgagaaagtaaatgagaacattgtccaaagcctgggagtgaagcatttggtaggaactggaggtggggagaaggaatgttaaattcctctttcttgaaccattacagtactttttccttatttggtgcatgtctggagggacagggcttgggcaggggaatgccccttctactctgctgacaaaaagcaccaagagtggctggaaaaggctgtagagcactggtttccagattttgttgcaccttggaaccacttggagagctttaaaaaacactgatgtccagctcttacctgcagacattttgatttcactggtctagagggtgatctggacatggggattttgaaaacagtcagctgggcatggtggctcacgcctgtaatcccagcactttgggaggctgaggcaggtggattgcctgaagtcaggagttcgagaccagcctggccaacatagtgaaaccccgtctctactaaaaatacaaaaagttagctgggtgtagtgacgggtgcctgtaatcctagctactagggaggccgaggcaggagaatcacttgagcctgggaggtggaggttgcactgagctgagatcgtgccattgcactccagcctgggcaacaaaatgaaatttgagcttgagcgagtttgagcgaaactcttactcaaaaaaaaaataaataaataaaaataaaaataaagaataaaaataaaataaataaaaagagtcttggcttattctgaagacagtcttttaaagtggccaaatgaaaaataaatgactgtgtcaattcagtttattgtaaacatttactgagcacatactctgtataaagccatatgctatgctttagtaatgcaaacaaaatgtaaaatatatacctacccctgaggagctcacaagtttagcggcgaggggggccagttacatggacagataaatgcaatgaaattacaactcagttaaatacaaaacattgtgatatatacaaaatcaaaaattgtcccaaagtagtgcaaagtacagaaaaagagacaggaccaggaaataccttacagtgtaatttccagatataaaataacaaatgatcagtatttctgaaactttgagggccagaggaagaatgggttgtagcaaagaactctatcataagggattttctatgttgtaataacatgaggtttcataggaataaccagcatcttagaatggggtctgtcttagtaatagtctaatgtaaaacaacacgattatttatttatcttgcctgcctactttccgttctccttccttccctcctcccctgctgtcctcctttcctccctccttccctcctctccttcttccctctctcttttcctccttccttttctactctcttcctcccttccatccttctttcgttcccttctttctcccttcctccccttctttcttccttcctcccctccttccctctttccttccttctatctgttcatctccccatgttatacctacctacctacttcctacagaggcacctacaactttgcctttcattgtttaactgagttatagattgtgaagactagagtgacttaaccacccaccctcctttcaactgtgtggtttattacacatatgtatctcattgatgttttttgtggacattgcacttgtgtaatttattcttttctcatttgggtaaatatgaatgcattgaaataaagaggactagttttttttttatttcaaaattatatttaaaaggaaaaaataatgagacaacagcaagagtcactatttaactcaatttgctgtattcttaaaactggaccttacagtaagcactataagtaagaaaacagctactttccaatggagatataaataacaatgccagatgagctgttgctcttaaatcttacagtgggacttcattagtgtgacaagtgagaagtaacaaatttattcccagaaccagaaaatgccattcaggataagtgttttgattaattcatttttagagaggtagggctgttttaatcatgacaactcttatttgccataatagaagcatccgtgaattttttttttttctgaacacttcatgtgtatttaccattccactgtcatgatctggttattactaggactgggttgctattaataatcaacacattattttaaaattgaacaagctaatatcaccagcctgtaattttctgggtttacacattgaatctattaccataattaagttaatagtattttaaatgaatgtttattttttatggctttgtgtagcaaactacaattagatgtttgtctacatacacatgttttaggagtgttcactctgtaaatggttttgtatgaatctattgtaagaaaaagttcaacctcttttgcatctccgatgagttagaattaagtgatactgctcctgtcaattcatttttttaaactcaaaagtttcactttatctgtttatgcctctttagtttgtctgtataccatgaacacatatccttcatctttccccaccttagtatccactaggttttttcctctctggttgcctatcattagtcaattgtttttcatgctaatcaaagagcagagaaaacaaacgatgagcatacaggtaaaatgacattcatgggtttcttagttctttggacactcagagaagagaataaaatagcagtttgaatcatttgtggttctgctgtatctgtaatccacccatttgacataatgtattattggagtggctaattggaagttcatagggtgtgtttccatatgcttattataaagaacagatgtaagagtcaatttcctgtttgaatggtgatttgagcactgagcaatttatttaatcagaaatgtctttattattcataaaactgttccagtctgatcccatgtgtttgtttcaattctgaatgtgactctctacccagggctgataaactctgttgttcacattaggatgttaaacagaaaaggtcacgcatctgatcccatgtggcctaattagtgtcaaacaaagaaaatgtctgtaaattgttataggctgcagtaccagaaacccacgttacttaccttatggggattaaaattgccacaaactctgtgccagaccatccccatggctgtggcaatggtactaaagccacattccattggtggtagagatggcagccaggagtaatgtgtcggatattgtcagttatcgctcagcatccattttcacctttttcaatgtgtcgtactgtgccacaggggcttgagggttaaaaatcaactttcctgactcctttgcagctagggttctagatgtaaatgatgttctgacaattagatgcacttgaatgagatttgaataaagttaaggcaaaggccatcttcttgctgctatttttgttggtgaagatggctgcagaaatgagtattttcaggtgtctgtggctgtcagacttggccttgtaagtgtctagaagcagttgtggcagcaacagcaatgccttcctgacctctgcttgcagcagctatagttttatgtccctgtactaatttgttcagagtgaggctcctgactcctgatctaccatgctgtctaggaattttgcagccagctaagctactgcattcaatcccattctacatgaaataccaggtttctgtttcctgcagtcaactttgactgatatgaaaatagtcataaccacataaatgaagagttatagtttactgagtatctattaaatgccagacaaattgaggatcagtgagataacttgtacaagttcataaagctaacgaatggcaaaaccagtgtttgagtttcggtccatctgtttgcaaagctagtacacaaagggcagaaactgtaatatgtccatttctattttcaatttttaaaaagaatgaaatcatgtcctctgcagcaacatggatgcagtcagaagccattattctaggcaaattagaacaggaatagaaagccaaatactgtatgttctctcctataagtgggagctaaacattgggtactcttggacataaagatgcaacaatagacattgaggctactagagggtgggtggagggagggaggggagcgagggttaaaaaactattgggtactgtgctcacaattgatgggaccactcataccctaagcctcagcatcctgcaatatacacatgtaacaaacctgtgcctgtgcctcctgattctaaaatagaagttgaaattattttttaaaaccccacattttagaaatccccaagggcagctgggcacggtggctcacacctgtaatcccagcgctttgggaggccgaggcaggcggatcacctgaagtcaggagtttgagaccagcctggccaacatggcaaaaccccatctcttctaaaaatacaaaaattagctgggcgtggtggtgcatgcttgtaatcccagctggtcagcaggctgaggcaggagaactgttcgagcccaaaaggcggaggttgcagtgagctgagattgtgccactgcactccatccagcctgggcgacagagcgaggctccctctcaaaagaaaaaaaaaaaaaaaagaaagaaaagaaaagaaaaaagaaaaggaaaaagaggaaaaaaaaaagaaatcccctagggctagggatatttggaaatccccaagggtttgtggttttctaaatttctattcaacattttagaaatccctaagggaaggagacttttgtatcctcaagtgcttgaggtctataacatcactgacaaaagaacacattctagaagaaccagatagaatatgtgcacccttgagactggaatagctgcatcattgaagcaagtccatatcagcttccacctccatggtaatacttgggatgcatagatgtagaatctagtctcagaagacaatgtgattctttagcccattcaatttgttcatccattattttttgtatgcatcatctcaaccctatagggggcagttaatgggttcggtttcatgtttcagatccccttgaccttgtttgtatgtatatcacagtgtttatatagtcagatctttcagggactgaagcaagccccgaaaagacaaagtgcatcattagctgggtttttcaggatttcgtggccagtgtaaaacaaaagtgggagagtgatagggcagaaagtgctctattatttctgttgtcaacaaagactcagttacctggactgagagcactgcccttcccagcctgcaggaagactcaacgccggggtcctatgatgcacaagtgagagaagggggatgttttgcctgagaaggtatgactctgggggccaagcaggaggggatgagctgtcacatgggagagatgcaggctaagaactaaaactaatgaatggaagttacagagaggtaagaaatttttttccaagaactgcctgggacaaacacagctactccaggaagccacttcactgctgaaggtgttttgtgcaaaggtgtgctggcagttaaagaggaatgctgcagataagattcagctccataaaagagtgtgaagatgtctctcatccctgaagtttataggatgctccccacaaagaactgcagatttcctttctaactcattgactggagctcagggacaccatgggttgaagctatggctctggagggaactagcctagacttacatcctggtcctgatatttacttgctgtattaattctgcacttcagtttctccgtctgtaaaacaggggaaagaacagtgtctctctcataggggtaagtgtgaaatcaaatcattcaacccatgtaaagtgaattgagcttcttattcctattggctatgtggtgattgacatcggagctcccaaacagttcaatgggagaaggttgcaaatgaattctgcactcagatgctcactcaaatgtcttgagaactaggagaacccaggggaccctgtgacaaattttcaacaccatttggtccagccaaagggttgtttcagactggctttctcagtgcttgagagagaatctaaatatttctcaaggcatgcattacaaaatgttcaagtagctgctctatttttgagaacatgcacataagacaggcccacaacattgggggatgttcgagaaaagaagggagaccgtgagcccaggtccaattagggatcagcaccttctgtgtccccgatctttacatggataatgaaggactggggagccgcggttgtgggctgataccatggcaacccctcttccatgattgtcacatacagatgagtgagtttttaatctcaacatcagtcctgaatctcattcattatttttaagccctaaaccagaaaataaatattgcttgtctttctgcctttgcctaataagtaactaaagtttacataaagacttggcttactttggttgtttctctgttgggtgtgtgatgtccaaatttaattaaaggccatgctgtcggctataaactcctttagtgagagaaaatgacaggaaggcccagaatttttttttacgaggcttgtgttgattgagttaaagcatgtgttctaactgagctcccttggaatgagccgtgcattgttccatgccacctggctgcaaaacaaacacaaggaatttggctctgacatgaagaaaccctcagtattagggaaatggagctgcattccacatggaagcatggcaacctcgggctctgttcctccccctttgccctctcaccagacccctgtgcatctctgttctttccaggagagggagaaataaaaaatatctcaatagaaatggaaaccagtgttgggtttttttgttttgttttgtttttctagcagggtacaccactcactcaaccataccaaatataagtgtgcgaggcttggaatgaagaaagaaatggttactttttaaaagctagcaatattaacaggtgaatgtcataggccatgagtctgaatgtgtcagaaaagaactgcaagtcattagacaagaccaatagtcctcctggagggaggcagtgaacctcaggactgtgggcactggcctgcctttgtcttgggtattgacttgctgagtggcctctaggaacttaattaagttcctggattcctcttttgacaaatccagattacaaacaataaccaccatggccagtgctcttgaattcatatgatagtagagcattataaaatcagaattctacttaagagctgataattatgtaggagagaagagcatgctgactggggcaaaggggccaggtggttaacttttcacggttcaagagttgataaaaagcatatgaattacaggccagtgagaaggacatttttatgattatttggaaatttttgactccatccggaacagagttgaaatattcaggtccgcagggtgtgagtagacagttggcttatgatctcagcagtcaggatgtgtcatttctgtttcctaaaaggctcccgataaatgctttctggaaggtgccagtgaaagacatttggaatttaacagagacagcaacagcaggttcggggcttatctcgggctgcattgtagatcaatcctgggcacagtggaaggaacactgttacaaaagagccatttctaagaaggcttcacttcaaaggagatcacccacagcagaggagctgatgcagagctgaataaataatgaaaaatacaataaagatcaaatctgatagggatttgaattatatgccaggaaaatatttttgatgaaaatgaaatggtagggagggttagagacagattgaagaattcataatcagaactgctcacgacctgcatcgcttagtcctgtacaattttgaggctccatgagaaggcagttagtgaaaaatatatcagtcttttctctgaaattcgaggtcatccttatcttgagactgcccgggagttcctactccctactctcctcagcccccactgtagtgcaggaaaactctggccctgatggagccatttgcaaagatgttacggaagaagctgctgtggccacccctgcagagccaggcacagatctaggacttcaaggcagatagttcctgttcatagtagaccagccagagccagcttttgggtatctctccagccctgaagtatctctccatcaccaatgatgggtatctctccatcagcagtgatccccaagaggtgatgtccttcctggccttcagccatgtttgttcagtgggacctcaagcctctttcctaccactgatgggtttgggatatagaccatgagaaaagagagtggggggaaagagaaaaggaaagaaacaaagagaagaagagaaggaggaaggggagaggaaagagagaggagagagatgtaggagaaaggagagaaaaaggacagggagagaaggagagaaagagagagaggcagaaaaggagagagaggggatgagagaaagaaggagaaagaaagagggggtgagagagaaggagagagaaaggggatgatagagagaaggagagagaaaaggggtgagagaagaagagagaaagggggcgtgagagaaggtgagagaaaaaaggagataaaaggatagagggagagagaaaaggggatagagagggagaaatgataaaagagagaaaaagagatgtgaggaagggagagagaaaaacaggaaaagagaaaaagatggtgagggagaacacatgctagaataaggcagatacagatgaaatgagaaatagtgaaagagtgagacagtgagggggaaataaaggaaaaggagagaggatagagagagaagtggatagcgagagagagagagatggtgatggagactgagacaaagacggtgagacccaggtacagacgcagagtgacaagagttgggaagaggccagagggggccaaacgtgatgcttgggtggcctctctgctcttgagaggatattggcagtgtctccagccctgtgcacatgtcccactgccatagcaaatccagaggctccgctctgctgtggttctatctgccgttacacaaactatgaggcagccctgcccatgcagagaacatagtcatgtggcctttcttgttttatcatcccttcactctttcttacaggctctcccccatcctcagcttctgtttgaaggacctgcaaattattcttgaaggacagatgtgatgctgtgctgggaactgctcttctcctcaaactctggcctgtttccttttcatgaagcctgggagcctctattctccctttttatgatggttctttttcaggaggtttctgagtcccaccagcaaacagacccgggtgggctatcctgccaggctgacagtgagacagagatggacccacaagggcccctgctgcctcgtctgccatcccacagcttacccgccagctgggcttattggaagctttcctttaaatttcactgtctcacattccagaccttcctcatttccttgggccagtgggctcaatgccctggtagctgggctgtctccctcttacatatgcacattattttacaaagaagcaatctagccagagcaggtatattgaaaatagagtttattggagttgctgattgtggatgcttgcagagggctctttcttatttttctaaaagttgcattgcttcagttgcgaatcaaggtcccttgatcaccatgcctcctcttgcctcatgctcagtttttcttattcttttcttctctttcatccaactgctttctccagacttcaactcttatatctaagcactttgggcctttggtgctgttttgaggcagactaactagagtagaattcactggcattaaaacagtagatccagcaaagtctggtggaaataaatagtgtagattagtggaaggaatatgaggaattggtaaaagattcatgcctctatggaggacatgctttgctgaatttctggagaatccgtggtcttctctagaattgtgtgtctttcatcatcacccagagagacaagcttttttgctcttcatggaatctggtatataatgcaacagagctccattattagtggagaagatgtacagacaaaaataaaaacaggggcagcgtgcattttggtagggtcttctatttcatcctaacacacaagcgtcttacacctctttgccttttcccaaaaggcatatatgttttagaggcaattccagtgagtaaattattcatctgaagacaaggaagatatagaatagttagagttttattataatttttttatactgcaagggagatttttctttgtctcctaaccaaaaatagcccagctattgccaaatgaaaatttcttccacatatccttctcttgccaaaacccttaataaaattttgtttaaaaaatcagtgtgaaccatgaaacagtaaaactcattctaatgtatgaaaacatgtatatactgcaaagtcttcttcttttccaagtggcctgaaggtggctttgctgcaaacagtgccttttgggcataagaagccctaagaatccagagacagttgagaaaacctattttctttcctgtctactcagtatttggggaagacaaaaaatgagaacataaagaaaggcaagctccccaagcttacaaaagattccatctctggtgatcctgtgagccacaaaataatagaagttttgaaatcagtgtagctcatttctagacaatggaggggattgtggcaatagttcagcatctgtcctcggttatttctgaaaggatagatagtatcgtagaaaaacaatccatacaggaacgcttgaacaaacaattacaagcatcataaagcaagcaggtctggaatcgatcccagcaaccatttcccattctcactcttctttaactttgcctgttaggtggttttcgaattcaaccttctgtgagtgtttttaatggtacactatcaattaccccaggtaaggaatgtctatgcccggttctctctcaataaagcaaaatatcacatcattaagtagttttcctctctgatttgtggttagagtaacctaaagagggagggaagtagggaactgtgtacctgtcatgaacacacacacacacacacacacacacacacacacacacacacacgtgtgcatgcaagaaaaacaaacaaaaataatacataaataaaaataatcttttctttgctagaacatttctccctggagtaactgctgaggagaatctctatcctgtcttctgtgtgtgtttgtgtgtgtgtatgtgtgtgtgtatgtgtgcacactctgctctgccttcacgttcctctctgagcacactgtacgtctcctgccacatgcatacacacgggacattctgtctggactcatgggacaagattacttgcatgccaactcactgcctcaggagacttcctgtttatattcaaccacgcatgggcccttataaagtcataattcttgccaccaattgaacatcttgttggaatatttatccactttgctttagctggaaaacaagtttttccatattgcaagaaataagtgcagtaacttgatggtgtttaattgcactaattttggatttgggggtgacctggattatacagatcctacttccatgatgtatatttatgggtacctcttccaccagctgttcaacgttctctacaacctgacctgcttacatgttaatctcaccttctaccctcaaccttgttccccatgctgtagcctggaaggcttatttggataccatactaatcatcttcccacttcagcatcctccaacttaccctcttcgtcacctggactgttcttccttcaaaatctgtatctgactcatttcttatcattctgatgtcattgaaatgtcatttccttaaagagactttctttgaccactataatgtcctctccttcattctactttcaacagcataaccccatttaattttcttctatcagatttcagtctctgtcagattgacttatgtcattgcacgtttgtcatcagtctcttttatggaatatggtttgtttgtggtctgagccttatagtcttattcacctgtgtgttctcaatgccaaggagaaggtttgaaacagagtagatatgataaatatttaatgaatgaatgaatttataaatacacaaaaccaaatcgtgtgctaaccactttatcaagctaaacttgataaatcactacaaaaatcttattggggaggtaccattattatatttgccttgttagaacttaggtttggctgcatgtgacagaaaatctcaaagtagaggcttaaaattagatggacatttatgtttcattcatataaaagcattttgggtgttccagatgtcatctgctctaccatcctcacggtcttaagatggccactaggggtccagccatcacttctgtttctagacaagaggatggaggtgggaataaaaaaggataatgcctctctccctttaagttccatgatagtcctcgcaatgtgtctcattggccattatttagacatataccatacctacttataagctggaaaacataactcagggcaggaatgtgcttacccaaaacaaaaacaagatcttgttcctaagaaggaaaggaaccagccctctacactgcatccccattgactctcacagagagaaagtgactctggcaaagtcacacagctaatatagcatacagtgctgagatagaaaccctaacatcgttacatccccaccacctccagcatctaaacctcccccacttacccagtaatatagtacacagagaatcatccctctctgcagggatctttggtagactgtggagccaaggttgaagcttctttcttcatagtccccaaatccagggagaatcctagtaattgtcagatgggcctgcatagagtctgcattcacccttcccctcctcagcctcactcagcaacctctttccttctgttttcttacataaattctcttttgtcttaacagtactaatgacaataatacttctttctatcgagaatttacttctattcactatgcactctatggttttatttttataagaattagtttatacagttctcacaagcagctaaatgaggttaagtaattatttaactcatttgaaagatgggtgatctatcagacctaaagaggttaagtaattttttatttttttgacatgaagtttcactcatgttgcctaggctggagtacaatggcacggtctcggctcagtgcaacctccgcctcccaggctcaagtgattctcttgcctcagcctcccaagtagctgggattacagttgcccaccactatgcctggctaatttttgtatttttagtagagacggagtttcaccatgttggtgaggctggtctcgaacccctgacctaggtgatccacctgcctcagcctcccaaagtgttgggattacaggcgtgagctaccacgcccagcctaagtaatttttttcaagtaaatccagaatttgactccaaagttcaccttacaagccttctccaattcaaacaccaccttgcctttaatgtcttcatcaccatgtttaaagcacattctcgtgactcaaaataaatgattgtctctgagctgaaggggaatgatgtcttattttacctgaaccacagatcagttgctgcaccggaatggtggacagttgcctcctcctagcgtgaaattacagtcaatgacccagaggcaagagggtccccatatcatcacagagccctgagactctcaatctctgtagggatgaatgtggaatttttctgttgcttctgtgtttccgtaactgtttacatactgtgtcatgttaatgcattctgccataccatttttctccaattatctgagcttttgcaggaactctgaggtagtgagacatacattgaagatgttccaaagaaatgaatggaggagttttctctgcaaatcctttttctctgaaaaactcggaaaagctcactgcctcatcttgcatgtgagcactccactctgaattctgaaaagcagcaaaagagaaaacagaatctggcagaggagagatgaatattacagaaattgtattttaaaagatattgttatcggggtaaaataggtgggaagaaacctcatgagttccctaagaaaatatctttcaaaagttaaaaagatactcttacttatagtaagtaagctggaaccaatacagcaaggctgtgtaaatatataatatgtggtattaaggacaggctgaatgcatggctaggcctttatttttaagaaatgtgtatttaatgcattgcacttgctccttcagctttgttacactctgttggattaagaggtaacttagcaggcaagctaatttgaaatcacatacacatgcgatataaatggtagacatggctttcagaagtattatttgctgttcacaaatccatattatgcaaatatcaaaagaatgactggtattctcttgtagtcaacattttttaaattgtactggttccacactgcctcaacagctcctgcttctttttctcggggtttcttttgtgattcacagtggactgtctcactgttctgagctgataggatcctattattatttacttcttcctttcaacacacccctgaggcagttcaaaggtgaattcaccattattaggtattaattcacagcaaaaacacaggcttatcatttttaaaatctgttgtcaggactcacactggttttacaatatcaccttgtcacaacaagaactaaaccttctgatgagccccaagcctgaatttctcaccatcataaatagtatggggacatatttaacatttattgatagagaatggctaaaatgtattaaggtggaaatttgtgctgaaaagtcttcgtattttagttcctttaatccttaaaacaatcttgggagctacgtgttattttatgactcctattttacaaaaagtcaactgaggcttggagaaattctctggttaaggttacatagtgatatggttaggctttgtgtctccacccaaatctcatcttgaattgtaatccccataatccatatagtccgcacgtatcgagggagagaccaggtggaggtaattggatcatgggggcagttcccccatgcttttatgatagtgagtgtgttctcatgagatctgatggttttagaaggggctcttctcccttcgattggcacttctctttcctgcagccttgtgaaaaaggtgccttgcttctccttcgccgtccaccatgattgttaagtttcatgaggcctccccagccatgctgaactgtgagtcagttaaacctctttcctttgtaaattactcagtgtcaggcagttctttacagtagcgtgaaaacggactaatacacacagcacagacatagtgcagccttatttggaacccagactgtttggctccagaatccatactgtgtgtccttcacctgaccatattgcatctcattctgtggtatcgtttacttaatcatttattcattcacccattactttttccaccataaaagttctaaatgaatgcgtactctttgccaaatgcaatacagaacagtcggtgagaatataggaaaagggaagtagcagcgatgctatggaatcttagagttctcctctcccagcctgggagtacaaatgtcatagaattatttatggaagagttgtcagctaagtagacaccaaaaggttaaggagaaattacctagatagactgggaagaagaaatgacaggtggaagaaacagcctgggcaaaagcacaggggcaggaaacaaagatggtatgtatgaagagttacaaacagcttggttctattacggcataaacatgagacaagagaggaagtcatagagttagcaaagggctgaaggatctgccatgctaaggagtcagcaatccccacattaggatgcacaaaatgatccactgagacacaagaagaaaatattaaagtttgtctttatatttctctttgatactgttttttctttccgtttttggtaaagctttaaaatatgtatagcatacaaatgcaataacagaggaaatataattcttgtgggaaaagtatgtgctaaaattattttactgatagggtctggatgaatataagtttgcaggtcactaccgtaagtaatggagagacaatagatgatttttttttttttttgagatggagtcttgctctgtcacccaggcgagagtgcagtggtgcaatcttggctcactgcaacctcagcctcccaggttcaagtgattctcctgcctcagtctcccaagtagctggaactacaggcgtgcaccaccgcatcggctaatttttgtatttttagtagagatggggtctcaccatgttggccaggctgttctcaaactcctgacctcaagtaatctgcccgccttggcctcctaacccaaagtgctgggattacaggcatgagccactgtgcccagaggacaacagacaattttaactgaaggctttcttggcgtatgcatgtgtctatagattgttctcaaaacactgtaatggatgacggcagaggtgtaacactcagggagggaagtgcactgaggagattgctgccaccagggaatttaatgttgatgaagatagaagccaaggctgtggaaataagagaaagtaatagattaaaataatttttaggtggttaacttaatagggctggtgatagattggccatgatatttaagaagcatcatctcactctacatgagctccagccacaagccttcttgctatcacttgaataagtccaatacaggactccacaggaccttgggcctcctttttctgctcctggaatgctttccttcatctttgcctggctggcctcctcatttatttctcatctctgtggcaatgtccattcttatcattgtggccttccctgaccatgttatacaattcctcaatacttcctatcaaccttagtgagctccatggcatacacatctgagaaattctgaaatcacttctttgttgtataatagtgtaacattagggactttgtcatttgtgttcattgctctttctcacgcgacagtgtttgacacataaaatgtgctcattaaataaaggagcaaatagatacatagatgaacaggtagatggatgggtggatggatggtggatggatggatggatggatggatggatgggtgaaagagtgactcttattaaacttatcccttaatgagaccattagagagatggaatgtttccactgagagatgagaaaaaggatgtcctaaacagattagaaacttgtctaaatttatcctatctgttaaaactctttacttagtctataaagaggaaaccaaataaaaatggcttatgtaatagaggaaatttattgactcaggtcactggatagtccagaagtagaacagcctcagaatagcttgttttagaagctgaagaatgtatctggaactggatctgtttctttctttctttgcttttttcttttctcctcccctccccttccctccccttccctcccctcccctccccttccctcccctcccctcccttcccttcccttcctctttctttcttttctttctttctctctttctctttctccttctttttcctttcttctttctttccttctttctttctttctttctttctttctttctttctttcttctttttcagtgttcaaacattttattaaatcggatagcattgttatttccacattgttgcacatactgacttgtattcaattataagagtatagcacatgtttacaaaggtatggctgagcagtcagttggtaagtttaaaatttcaagagcgctccaagagcaaacacagtaaagaccatgcaagttccagagtcgtgaattatgacagagctcactcattttattccttgcctgcagttgttccaaatctcatagcctcaactctcactgtccagacacagagaaaacatctgtttccaaaatcccattgaaagtcctaagctttgccttacttggggccacttctgagtgactcacagaagtcattaggttgctatgtggcaattagtttaggcctgcgatttcttaaccaatctctgtgtcaagaaagatagtaccactctgattggcttagacaaattagggtctactttttgaggaggggatctttggggaggaagccacaatgtcctttataggcttggaaaaaaatctgggtgtgtattattgcaaagccatttaagactgtgtgtttctttatcaagaatgctttccataacccaaagatgtcacatatacaaaatttgagcagaagatttgcttctaaaatagtttcatatcttttgtaattcttaattatggtatacataaatagacttacttcttccccattggatgctatgaaacatacccatgactatttaaaaataataattcactattaaatttagataacaaatgttaatattgtaagacaatagcttcccttaaattctagttctctctgcttacttgatgtgactatcagtagataaagggtcatgatttggatctggggaaggacttgctgcttctggtttgtataaaggaattaagtagggaatgtgtaggaaatctggctgggctcagcaatgccagctttaatggaatccaaacaggttttcttaaaaataaatggtcatgagaaagctgaacgtcaacctcctttcctgttgataaatgacaatgtataccagattgtatcaacagttccgtggagcaggacacccctctgcttttgagtctctgaaaaaaaattatgctgctttccagcaactgatctcctttttctccatactaccgcctttctttgtcatttctctcacacttttgttatcttctttaattgcagtatattctttcgcttggcaaacacacatacagcaaagtcaatccaaagtgcttctgatttgagcaagttccttgctctaggctcacctgaaaatgaccatctgtgttcaggtcatagaacttataaatatacatttaattttttttctgttttccactcactttttataaaataaaggaaaacaaatttcacagtgttgtctaaagactgttcagcagttctgttcatgatactgcctatctgcaccactgatgttggatagcacaatttttttttgtttttcaatgaattaaaatacaacctagtatgcaaaagatgctaaaataggagaaacaaggcatataacatgtgaaacctgagaaccccttgcgcttgccattccacaccttttcagaagactgaaaactctacattattgaccatgttggtgtcatcagcacacctgacaatgatcttcttatccttatggaactggacatcctagcctttctatctgctcttggcataatctcttctcttagagggtactgtttattactttttgaaattgaagtgaatacaaattatttttgcttggagaatatctttgagaacttcatgacaccctttgaaaatttgaaaatggttgggtttttggtttgttccagaggccatatttggtaaacaccaacttctgaggcaaacaacatttctgcacagctggccccagaggcggtccttgtgccaaatccacccatgcaatggttgatgccaaagagttcagaaacacaaatccaatttaattctggctcaaaaaagcaataagtgtttaaattggatttctgtggagtttgttcttattaagcacagcacgcaaactgctttataggcatttattatttagttatttctaacaaaggatcttatagatccagcatctataattaatcgggaatgagagtagatgctagccaacatatgctctgtgacccagaacttgcactaggaaagctatcaggtttgtaccaaacaccagggtcgttggcaaaagtttgcttcattaaattcggctttgtgggttttatgcttttaatccaggctctcagctctgtctgtcagccttacctgtatcatattaaacttaacagggtcaatatgatgcaaagaggtggcacctggaaagtggtgtatcagtgactccgctttcaatccaatcatcctcccattatgtcttgtcatctttcaactccagtggtcctgaggcttcttccaggcacctccactcgagattattcctggatatgtgctcacccccatgtggcccatgctccataatgatgggtcccatctcgatctctataaatttccttttctgttgaagcactaatgaaaagataatttcataaatggttatgggaatggcttacttggttctcggttgctttttatcttttcctaattactttgcattttagtaagagccttccagaaacagagcctaaataaaccagggttgtaatggtggagatggcagccccatgaagctaatgagatagttggagtcagacttattgcgtggccatgggaggtctggctctgcttacctacattttatacttggcccagaaccttgctcacagcatttgataagcaacccattgttctgattcctagacactgatgtcagaaacaagcactcacctgctagtgttgatcacatactccatgattatttatcaaaaaaggccttttctttatgagactgttgttcagtaggccctttatagtcacaaaggataattctcataagctttaataaattccaaatatgagtttagaaatgttagtgctagttctggcttttcttggtttctatttccaatgagagtcatgtgctttcaatgcatatattcacattacaagttaattcttttcatctttcacactaagcttttgtattttgtttagtgtattttttttatttcacaggagaacagaaaagtttactttgccacagtcagtaatatagaaaagatcgaaaagagaataaagaaagtgttctaagaagtggctgctgtgtggatgactaggttcactaactagctgggtgacttatttctatgtcagccttgcagtggacactattaacatttgggcatctgcaaaattataccttactacatcatggattttcagattaataatcaagatgtaaactcataagtgctaaaagtgtgaatgccacaagtctattttattgactttgacttttgtggtttcctagctctttttttttttacatagttgccttgagtaattcatctactccctttctgccctagttttctcattcataaaataagtataacagtacatacaaatgctgtcttccacagggttggttgttatgggaattaaatatgttaatatgagtaaaatgcatagaaaaatgcacagaagtcttactgttgtaacactaaagctacaactaatattactgctataattattgcattattgttaattggcctgataattgcattatctcattttgtataatgttgggcgaggaattcattcaagtaggaaagatctaaaagataatacattagaaaagacaaaagtaaaacaagtacaaatttctaatttctcctctaggccctacacactcttcaaatcctaaacttttggacttctatctcttacacctaaagtgaaccttctagaggtaattgccatctgcatagttagacatgtccaaaacagattagcactctctttatttgtgcacataaattgctatgtcttttattcaataaataatttttggtcacttattcatgacatcgtggatgatacaaagatgagaagcacatgatttctattatcagagagaaagaagaaaaatatatggacatgtgactaaagtcaaacgtgccatgtcaacaagtatgggcagaatcagctgtcgtgcagtagatgaatattttggctatatgcaagatcagtggagcatcaatcactcagtctgaatgtgcagcaattagattcagttaggttaatctgttactggattccaccattccaacatctggttggctcagtcataaaagtgtttattatctccgtaagtcagtctaaactcatagtaggctgccacttggagcttctgcagtgataggacaccagcattctttccctcagtggcctatgactgctgttggtcaggtgtctacagtgacttcaagatgattccacatccttgaatcatttctcaacacttaccagtgcactgggttgttgggatataaacacaggaacccacaaacaagacatcctctttctgggactgactataaatccctatcccgtattcatactggaaaactggtaagaccttgtaaccctcagcattcttttgctatctgagaattaggggctggaatttaggccagctcttttctaggctttcttgatttttccactccaatggaagaaaagcagaggaggaagcaagcaggaagacatggaaaagaggacaagatctatgtccctccgactagggcagagtttggataagcatcccattccagccctattctctggttaccttgcgcttttcatggttgacaggatgggaaccctcccaaacagcaggctgcgccggccctaacttatgtgaccggttgtaaaggagaaaaggctaaatcaatagggttataaaagcacataccatgcagaagttcagagaaagcaacaaggaagaacctgaaaagtcaagagcatcaccattatcagagaagtttcacttctaaccccatttacttagcatactgagctccacctttaccatagtgacctcctggtaagtgggtgccaggagctccccctagagtttaaaatgtgccattgtcaatacctcttaacagcctgggggaaaatgcttgtctggcaggcataaggcccagaggagatgggagttcagaagtctacgtattaggttggtgcaaaagtaattgcggcttttgccattcattttgcaccaagctaatacacaattacaagccaaagtagatatctctccctcttccctaagcacccctccacttgaagtgattttgcccacaccacatttgaacaaactcaaactgcccccttcaaaatgatgggatgggggagtggggaaatggttaagtctgtcagctaagctgtcccagagttctcagagtcagaatggagacgattgctttggtatctgtttgatggcacacaaggaagaaaaggcagctacacatctttctcttgccctttggcagcagatcacaaatgtcacagcttgggagggtgccaattagtgccccttgtatcctaaataacctgccacagaaataaaataccaagcagtccttgctttgtccttgtgagttggggcccatgctttcccccatatagagtatctaattttgaaaatgtcactgtagatatcggcacacagtgattctacagctggagagatgaaggtggaggccgcatatgatttgagtcaccatgcttctccacggactgcactaagtctcgtctataggactcaagttaggtagcagttcatagaaatggcatgaggtcagataaagtaaacgatttcaatcacacttgaaaaatacaatgtgtgtgtgtgtatgtgtgtgcgtgtgtgtgttgtgtgtatgtatgtgtgtgtgtgtaaaacacattctcaaaaagggggtgatagtataatacttagatgtgaaaaaggacaactctgataattgtagaaaattaccttggtatgtgcatatataccttttgaaaatagagatgtttaggcattttatattcattttttagagttccacttttttttttttttttttaacattctcttctctttctctgttgatttaccgatagaatatgtgtgtgtcaggacacttggcaagatagagacagctggaagtaatagagccaagctctgtttgaaaagctgaattttcacaagtggtttggggtttaggtgtggggagcagaaatcctgggcttcggaataacttttgaaaagttgctcccttgacgtaaagatttgaaagaagtaattcacagcctgccttgcactttttaaaagttgtgtaacattacgccacctaccacaaaagaaaaaatgtatataggaaaagacacgtcaacattatttcgaatgatgtatttttaatgtcataactttctattattatttaatctgtcaaggaaaacatatactggaaacatttgagaatcctccctccctgccacctttgcaacacacacatgtccacacgcacttttctttgccaaaagtaagaagctggggtctggaaggcttgctcctgaatatggtgtatatcttatgtaaataaaacagagcatgcagctcaaaaagaggaaagtagtttgtttttccatctttgatttctgctgttgtggctcctctttgttacgaattaagtctttaccatcatttagtgaaatgttatcctcgtaatggtaacctggattgttaccaagttacttttacagacaccatctccatttctccagtgatctagtaactccgtggtggatttaactcccctattgtttttggcttatacacatgagtctgtctaatgcaagctgtgtttttctgggggccgaataaaaagtcttcatgagtgatagtgctggggttgcagtattgaaacatactattgggatccgttttctgattttgactcagtagcctgtcagaggcagaatgcttctccttttgataacagggctaactagtttctgaaggaatgcataaaagagtcaggctgtatgaattccagagtcttaaattcctttagctatgccctgcaatctttaagcaggaaatataaacatgtaccagctataaaatgtgtgagaacaataataggaatggctatctttcttgcatctctcaagtgtgacatacagaggagagctgtatcttattactaaccttgtccatcaagctaatatttgtatattgcttttctagggcctaatggctgagccctatctctgaatattggataaaggagcaattagaatcgtttgtgccaaaccccagagttggaactgcaggcccttttaatatgagtccaataaggaaaggtttagtgtaaatgaaggtcagctgtcttgaggtccctgaccaaagctctgtgtgaaagctaaacagagccggagggagtttttttcacctggctataggctaaatgcaacacagccctatagcatgcagatgctcccaaataactaacttattttcacaaggaattataaagcataggaaaattaataaattaaacatagctccagtcctgcccccaagaatagattgcactactaagttttggcaaaagtaagaagagaccataaaagtattagaaaaaaaaagaaggaataatttattaaaagtttctattttttaagtaagtatatgataaaaataaagatgtttccaatttgatttctaaatctttgactcttcaattgcttggtttccatgcttggcatggaaagaagaaaggaaaggagaaagaaggaaggaaagaagaattgcaggcaagtaagaatgaaaaaaggtaaggacaggaagaaggaagaaagaaggcagaaggaataaatgaatgaatatgcctgaatggccacatggaaaatttaaaaattatccaatgctgagtaaaaatcaatgacagccagtaaacaagcacataagcacactcccctaataatccgtcaaataggatgtttttaaatcacagcaatatttgttatttcttctgatgctttctatttgttccaagccttagagcataaggctagctactaaagagcagaaagagaaatcgaattcggctacctgttgttgctggtatggggagggagatgaataaaagcagttccaagctccagtggctggttttcatgaaaatgtattttcttaaatcaataccatttcagactggttagtttttggacatcctttaccaaagatagatagataaataaataaatgagaggtcattttatatttcctttatgaaataaatatgcttaaactctaatggtaaaaatgtatgtgaagatcaaaatttatattgtgcttaatgattaaatgggctacagaaaaatatttttacctagtagacagcatcttagtctcaaactcaggctctatttaacagtcttaataattagcttcaggctgggcgtggtggctcacgcctgtaatcccagcactttgggaggccaaggcaggcagatcagctgaggtcaggagtttgagaccagcctggccaacatggtgaaaccccatgtctactaaaaatacaaaattagctgtgcgtggtggcacatgcctgtaataccccgctacttgtgaggctgaggcaggagaatcgcttgaacccaggaggcagatgttaccgtgagccgagactgagccattgcactccagcctgggcaacaagagctaaactccatttcaaaaaataataataataattagttttgtaccctcagatagtcaagagcaatcagatttttcttaacctttattttctcctttgtcaaagggagctaatagcagagcttgttgccttgagattaataattaaataataattcattaataattaaaaacagtaaaataatacttgaaaacgcttttttaaaaaatatagacaaaacaaaagcttttttcttttctctctctctctttttttttttttttaacttgaatatcaagctcgctatgcaatttgacttatggagtgctgcgggaaacctgttggatattttcatgtatgtccttaaacacatgactgctttccttgtatgtgcttgattcttgtcagtccttctcctcgttattgaaagcatagattgctggctgtgagttggaatcatccactggataacaaaggcagtatctgttttctgggcctcattgtttgcaggtctgtgtgtggtccagcctagaggtttctcttcagagatctatgattggcggtaagagagaagtgaggttggtcaggagggtcaaaacaatgaggaattgcatggatgacccatagacagaccagtggtcatcgtgtcagaatctccctgcagcagcttcctccatcaccgactgagcagggctacccaacccactagccccctacgggcttatttacatgatctgatttccaaagaaactttcttttccagatgttgtgtgctttgcaaggctcagctctgtgggagctctgcttgacaaactctaatatagtctacatgctcacaaggatggtttttgctaaagagaccccagtgatatgttggtgcaattcaggatttctcagggtagcacatcaccaaagtgcctgcaacaatactgtcaagatcttactgattcttctagccagaagagactaaaacaggtgatccaagactcactcaagcatgcttcgtttcttaagacatatagtaacatagttgcttttaatttttaaattttaaggattaaatccaaatttgatcttaggtaaatatgtaaaatctagtctaataggttttgggaggatggaatatagtgagatataatgttcattggataccaataccatatttatttcccactgtatatgatgtcagaaaccgttttaaaatgcagctggtctaagtggaatgttcaggtcttggtttgtaggtatatgataccttggttatttccatttatttttaagatcttattgtctgtgtgcatgcctgccttctgcagacacaaatcaaaagcttgcaagatagcacagctttttttttttttttttttttttttttttgtctcttgatagaattaggacaaagatctgtacatggaatagacctgaggctgggcaaggtcttcctccgcctatctcaccatctttgtctttgctctgtgccctacccaaacccaccttcttttagttcttcaaatactccatacctgcatcaaccagaagttttttgttgcttcccatgtcgtcttgaccacctagaatgcttgtcacctggttgcctcctgcttctcctgcagttattatctggtaatgtctggagatatttttgtttttcacattagggggtaagacactactcaaatcttgtgggtagaggccaggtgtcttagtccattttgtgttgctacaaagaatacctgaggctgggtaatttataaagaaaagaggtttgtatggctcacagtttggcaggctctacaagaggcagggcaccagcaaatgctcagcctcagatgagggcttttgtgctgaatcaaaatgtgatggagaaggttacaggggaaacagacatatgagggaggccttccttaactttctgatgagataaaagtcctctgttataggctcttactgcaacagttcctgtctgtcactgctgtcattagaattgcagttttactttgctcgagtaatatattgattactgtctaccacccccaccagattgaaagtttcatgaaggtagagtctgtatctagtttgggtcttcattgtatccccagaacttcatacagtcacataaaagtgatcacttggtaaatatttattaagtgaatgatggaatgagtgaataattgaagaaataaaggcataatgggaggagagaacaaaaaagaagtcaggcaagctaccaaagtgatgtgcttattgattgactaattttcaaaccagttcacatccatcacaagtttgttcatctatttacttggaaagaatagatggaaactgaagcttgaaaaaaagtaatcatcgagactgttttcatttgacatgtgttaatttcagcaacccctttttcttcaataattcctctgttgagaaagtttggtgatggtatccatgcacatcatttttttttcactgaagctcactgacacctggaaagccacgtagtttttcagatttatttagaaaatagaaagcatctttaaaagtccttcaaaagcacaacagcaggattttggtgtcagtaatcatatgccatatttcaggcttttaatttcctcggaatggtatttcttatgatctgaaagcttttttccctcccctgcatcagatcttattttaacatactgattgagcctctttatcttacacttcctgctgggaaaatagatgctaaaatgtgtgtaatgtcacatttactttaaggcatcaccagataaaattgcaggacccacaggcatgaactgtggtgtgcatgtgtgggatttcttttcctacaactccagatctccatcagcagctcaagccaaacattcagacccttcaacgttatgtttaattggatttcattctttttctttttattaaaagcctttagtttgtaaatttttttcactttgtactgaagcttttagaaaagagcaacctcttttttcaaaacaaagttttgatctaatcatttgcatctgttttgtactaattttctttgcagatgtttcggagtttgagctatgcagttaatagaatgacaccagattccaactggtctcttactatttgtgagacctcactgttttcaagggtttaaaccagtgattcttaactaggagtgattttacctttcaggggacatctagtaatgtctggagatatttttgtttgtcacattagggggtaaggcaactactcaaatcttgtgggtagaggccaggtgtcttagtccagtttgtgttgctacaaagaatacctgaagctgggtaatttataaagaaaagaggtttgtatggctcacagcttggcaggctctacaagaggcagggcaccagcaaatgctcagcctctgatgaaggcttttgtgctgaatcaaaacatgatggagaaggttacaggggaagcaggcatatgaaaagaagggaaaacctgaaggtgccctgactttccaacaacccactctcaagggaatgaattcattaccaccaaaactcatccaatctctcgagagtgaaaagtcattcactactgtagaacactgtcaagccattcacgagggaacagtcctaaaagcccaaacacatcccagtaggacccacttttctacactgcggtactgggggtaaaatttcaatatgaactttactgggaacaaacaaaccatatcaaaactatagcaccagggatgcttctaagcatcctacaatttacagggcagtacccacatcaaaaaattgtctgccctggaatggcaatagtgtcaaggatgaaaaactctggcttaaactcaaccttaggcttccactctgtaaaattaaggtgtaatcacgtgcatcatagcaatgttgtaaagatgaggtaaaataatgcatcccacattcgtagtgtagtcagtaactcatgagccattgttatgaatatggttgcattattaagccctttacgatctggtccttaatcacctttctagatttaccttttccaattttctcttatatcctcagggacctcttaaaatttaccacttgttacccattcttatctggctaacttcccactctttacccacgctgaagttggatgtctccctgaaaccaatagactaatctgaaactaacccaaagactcatctaattttctggtttaccccatttcagagcccagttcccactgcactgaaattgtctgtttattatttttcagagtgtgatcaccacaccttgtgttaaaattaccaatactaaaatgccctttcctggactttattcaagatctactgtatcagtatccccgggcacggggtctggaaatatgggcatttagctcctgaattcattggtagctatactaaagtcatcactgtagatcctgagtttcaggctgggattaggtctttttttttctttgcatccttggtgcttagcattgtgactggcacatagtaggcacttcataagtaatagcactatttgaaaggataaatgaataataaacaaaaacttttattctactcttgtctcttattttgaaaagataaagacccattggtattagcattcagaggggagaaaatgctacttcttctgctctgttcttatatattcttatatacaagcatgctaaggacaagatatgcctttgtttagcaaagtttgaaagtgagaatcattagactgatcaaagaccaaagtcatgttttgtttggcttgtacaagctcagagagggttttttttttttctgtctgttgtggttgttttttcaagcttttaattgttttaagttttgaattagtggccaatattttcatataaaaatatgaaaatattgcagttggtatgttgatgagtggggccttatggggaagaaaaaggcacattggtattagcattcagagtgggaaaatgctacttgttctcttttgttcttgtaattcttttatacaagtgacttctgtcgcttaaataagtcctcgaatgtttacatgatcaaaaataacttatttttgcctattaatgtatggtttataaatacagatgcttaaaggggttatagaaagaaaggtaaaggaatagaagtcagctggctgtaagacaaaccagccaaactggtgagctcatgttctcttatagaaaggatgctgcttctctgatcagtaaatggttgctggttgaatggggaaatggatgaatgagatctcagcaatgccagatgtttctgtttctcaagagaagtcagaatttgatttttttttttttttttttttgagacagagtcttgctctgtcacccgcgctgtactgcagtggtgtgatctcagctcactgtgacctccgactctggggtcaagcgattcttgtgcctcagcctcctgagtagctgggactacaggcatgcaccaccatgcttggctaattttttgtatttttagtagagaaagggtttcaccatgttgcctaggctggtcttgaactcctgatttaaagtgatctgcccacctcggcctcccaaagtactgggaatataggcatgagccatcgtgcctcgcctgaatttgaattttttatgtgaaaatattggccactatttcaaaacttaaaacaattaaaaacttggaaaaaaaccacaacagacagaaaaaaaaaaccgtgtctgggcttgtactagccaaacaaaatatgactgtggtcttttatcagtctaatgatgcctactttcaaaattgctaaacaaaggcatatcttatccatagcatgcttgtaaatgagaatatataggaacagaacagaacgagtagcattttctcccctctgaatgctaataccaatgggcctttttcttccccacataaggccccactcatcaacataccaactgcaaaaacagaagtcgggcaaaagcagtgcgtgttgcttctatgtgagctgaagtttaatcacagtggtgtgtataatgatagctccacaggtgtccttgtctctggaaatcttggctgtgaccctgtaagatgtaactcacagtctgcaatgagaaacggggaataaatcagttggtcagtctctctgtatgataaatcatgagtgtgatgctttggcaatttagatcagcattaaactctgggactaaattaaagaaatcaccttcagcttgagtctgcacctagattaagtagttgtaactttctaataaatgtggcaagagttctgtgaagattcagacaagtctcactttgttaagaaaataggggggatggaaagcaaaggaggaactgaaatatttgggaagaattgaaccaccaagggtttagattaaatgatcaaagacagaagagcaagtgtgatatcctgagtgagcagagtacatatattttctttaatgggatgtagtttaagcagcataaaatatttatttcttgtagtaggtaattgagatccctaaattggggcaattactttgaatttagtcagtgtatcaatcagctatttttgcgtaacacccccctaatcatcagaggcttaaagctccaatcatttattttgacttacatgtctggggctggctggggttggctgacctagtctggccttgcctcaatagctccacctcaaaacgtgtgtccatctgggtttggctcctcactgcgagttgtgctcaggtctgatcctcatatgcttggtctggaacctcaggctgaggagcaacagctggccagaagttgctcttttttcatggtgttgacagaagtacaagagacacgcacagtggcacaagtgcagacccagcctctgcttggatcatgtcagctatcatcccagtgggttcagctaacctcagggtcaaacccaaagtcagggtgtggggaggtatactccaccttcagtgggaggaaccacaaagccacaaggtaaagatacagaatacatgaaagtggtgaataattgctgggcagtaattcaacttattgcactgttatgatagggcatccgtggatgattgtatgggttctgtggagatggcattatctagttggattgcataatgataaaaggtaattaggcagtgctaggcagatgccaaaggttcacacagagactttctccttgatataatttgaagtcttgattgagaagtgaaaagggagatggctaggtttgctggcctagtgctgtctgttttgcttctaaatgattgttgaacatttgaattaatgttaatttggtcaagcttcatcaaatgtctgtatgccagttgtgagtcttcttctaaaggaattattgtgccccctactttcatttgttttaaaagcctcatcactaaacttatggtcggcagtatattgtagtcggtaccttggttgacgtgcgtggattcctatcttcaacaaataatatggtaataagaggatataactcaccccttacatgtaaactacctatatccacacaaaattgtctttcattctctgagaaaccacaggactggccatgtcaatctgaggagcatcctagggaatttgcaagaggacctggagaagcagggctgcaatgtgagggtcacaatagaaactaatcaattgagtttcactccatctgcagaggatggtcagcaaggagtcagaatttgtctgtgcttcttcaaccccatcctaaatcaagcagaacatatatttcagtctccagagaggagaaaagaggccatgggaaggaagatggtgcatcaagccatacttgaagcttgaagtgtcccattcccttatcctgctttcatgtgcatgaagcaaccttggtgttcttgtttatacatatgagacttattctctaagcatccccacttctgggtgccccaagaaactgacaatccacagtccagcctgtggtgaccctcctaaaatcatgccgcctggtgaagctctgcctgttttatgatctgacgtcccagatcttcatctttattttgtttctcttggagatatgcttgatatttcatgctgtagagaaaatagtaaaaaaaaaaagtgttagttaaattaaaagagtataaagataaatggaaaattaaatgagtagccttgtaattaacaaggtagttaaattatgttttaaatgaattcttatctgctgccatctgatttcttaagaccttcataaaattggtccatagcaataacattacttgactggaagtttcagaacacagagtggcatatatcccaaaaacgcaaataatgtgaaactgagtgttagacatctcttatttaaagaaaaacatctcccaaccctccggcaactctagagaggaggagatatctaaatgactaatcaatcaattaagttatctcttccatcttctattcaatgtgatccaatcttccccctttagctcagctttacccttcagcagcctgccctagggtcttttttttgcacacatgattattgtcaggatacttttctaaacaaagactcattttctccctgtggaggaattctgatgccaaatgttaagaaaattgtttgaccctaataaaaatttatgtattttttttctaaccctgttcattattgatttcagtttattctgaacactgaattttttaatgtatcaaaagtgtgttgttacctaggtcagcctgtgtggtcactcagtcaatacatgagttttaattcaattcaataaatattttccatgtgcaaggcactgagatcaagcactgggcatattaactgtaaattagatttagtgcttgccctcaagaagattacagtctagtggaggaccagcacccctgcacaaccacagagtgccacgagccatgtcagaagaaccccctgcattggtaaagaagcacgcccacctttacagttgagtatttctcatgggggaagggatattttccccaatttattataaaaaatttcaaacattaagaaaaattgaagaaatagtgcagtgaacagatatgttccccacctggattcaataattgaaatttgctgtatttttgttttctttttctatctatctatcaatttactgatctatcaatctatctatcatctatctgtctgatatagtttggatatttgtccccacccaaatctcatgttggattgtaatccccaaagctggaggtggggcctggtgggaggtgttttggccatcagggtggatccctcatggcctggtgctgttttaatgatagtgagttcttgtgagatctggtcatttaaaagtgtgtggcacttcttccccactttctctcttgcttgctcctgctttctccatatgatgtgcacgctcccgcttcaccttccgctgtgagtaaaatctccctgaggcctccccagaggccaagtgatgtcgctgctaggcttcctatacagcctgcagaaccacgagccaattaaaccccttctctttagaaagtacccagtctcaggtatttctttatttcaatgcaagaatgacctaatacactatctatgtatctatgtatctatgtatctatctatgtatctatctatctatctatctatctatgaaagcaaattggagaaattatgacaattcatcccaaatgcttcaacttgcatctccaaagaatatagacattctgctgcacaaccatagtatcattattatacccccaaaatggacaaaaattacatatcatctaatacccagccatatttgaattccctcaattaatcctcccacctgttacggctctttactgttgttactgttgttgaaaccaatcatagattaagcactaaatttgtttttatgtcccttcagtttctttcaatatagaacagtgtcctgctttggtaaagtactatattttgaatttttctgattattttcttaaagagctgtataacatttttctttaagtcttctatttcttgtaaactacaagttccatcttgaggtgtgattagattcaggttgaatatttttggctagaaaaattcataagtgaggcaggcacggtggctcacaccgtgagtgtgtaatctcagcagtttgggaggctgaggtgggtaggtcacctgaggtcaggagttcaagaccagcctggccaacttggtgaaatcctctctctactgaaagtacaaaaattagctgggcatggtggcaggtgtctgtaatcccagctactcgggaggctgaggcaggagaatcacttgaacccaggaggccgaggttgcagtcagccaagattgtgccattgcactccagcatgggcgacagagcgagactctgtctaaaaaaaatataaaataaaaaaatgctgggcacggtggctcatacctgtaatcaatcccagcattttgggaggccaaggcaggcagatcacctgaggtcgggggttcaagaccagcctgaccaacatggagaaactccatctctactaaaaatacaaaaattagccaggcgtgatggcacatgcctgtaatcccagctacttgggaggctgagacaggagaatggcttgaacctgggaggcggagcttgcagtgagccgaggtcatgccactgcactccagcctgggcgacagagtgagactctgtctgaaaaataaaataaaaaataaaaatcataggtgatgctgcgcatttcattcacatcaagaggttcccattgttatttgtggtgccatgtttggtcacctggttttgatgtttgtcgcaaaattatctcgattatgaagatacattttctccctcgttttcaattagtaagtgatctgtgagttgacactggcgtcattgcctagcttgcttacccaaacctgaagcttgtattatccattgatgagccttttctaaatcactccagtagggttagcaaaatggtgattctctaattctatcattccttctacatagattaactagtaggctcctgtaaataactttcattttttaatatgcttacagaaagaaggtgtatttgagtggagcatgacctagaaatagcaaatatctagctacacataaacgttaaaaacccaagaacaggaaagaaatttagagaaactagagcatttagagctagaagggacctaaaacaatatatactccaaccttttaacaagtgaaaaaagtgaagtccaactatgttgtttatttttatctcataactaactagcttgatgtaacagatctttgaataaaaggaaacacattgtacacgggtgcaatgaggtcaaagtacgaatataattaccactgatttgttgacaacattgtttgctgcattataattttataggataataggagattgcttattccagcctcagtaagcattattgcacacatgaaatgtgcagggtataagtttttatatttttccttcattatgtgattgccaaggctttatttctaatgctaagatattttcactgggtttaaactgagccgacttatgtaccctggttctttcctactcttgaaactgtcagtaatgtcacagtgtctcatagctggaaatgtagtaaccacatcactccccccaactcctgctccctgatttttcattaggatgcagtttattaatccaagtaaaaatatgaaagcctcctatgattaggtttaagcctaatatatgatcctccttcctggaagggcactttgagctggtcattagggaatggagagaacgggtatcattagggaatttgcctggcaagagcaaggccaagactggaaggaaaattggattttatttgccaaagccgaggtaatgtcctaaataaaaatttccccaaccaggaagacctaagaaaattgtcaagaggtagagtttagaaccaggggcacaaagggcaggtgggagaataggctgggggaagactggagtgctaccaacaactagctttatgttttcctttataaacacgtattgagcacctactatgtgacaggcatggtgctgtgtgttttgtgtgcattacctaatgtaatcctcacaacagcctagaagtcagtacttttattaccctcattttagagatgcaaaactgaggcaacttacctatggtcaccctgttaataagtgttggggtgtccctgacccctgcacttttaatcagtaggtaatatgtagtacctttctctggcttgtaaatgttttcttgcagagaaaatgggaagcaactatctagattggaaaggttaaaacgaaggaatcggaaagcaacagttaaatagagttaaatggctacttttccctctcagagttttggaatacctatgagctttcagccataaagccaagaaggttctggctggcacgacattgtccccgactaatgctaggatggtgttgtcaaacagaggcagaaacagagccctatcctgtttctgctcagttgcccatttcagtctccgtcctgatgcaacacgaacttctacagacagactcagggtctccagaaagcaaagcctttaggaattaaagtcatctttgcttttaaatacttgtttctcccatgttaaggacacttttctaggcaaaaacctcctgattgcctgttgctgtggcatatcttcacaaattcatttttcataaatgtcccaaatacatctgagacattttttataacttgtgtaagcttccagagacaaatgttaaagatgacagtttggaaatgaagacacataaaacatgccttgggaaatagaaatcctagggcagcgacctcaaattcagtcctctgttcctttttagtcaatatattgaatatcatattcatatatatcatatcaacatcatatgtatcgaatatcattgtatgctgcaagtctaaagaaagagagactagaagtgaagaggtcaaggtttcagccatccatggacctgtgaaggcttgactttgaaatagtcacatgatcactttggctattagttttatcacttctcttatcttggtctgaagatctgagctgtgttttatgataaagaaaaatgtataagctagtttttgctgtataacaaaacaacttaatcacttaaaacagtaacaatttaatgtagctcatgatctggtatgggctggctcagctgatctctgcctgggctctatcatgcaatggttgtcagccagtcccttagctggctgctgggtaatccaggatagcatcagctctacattatggatttggctgagcacgttgtttctcctctgtttggcctcttctctccagcagtgctcagacttattcatgtggtacctcagttcctaaaacagcaagatggcaagccccaatcctctttgcaagcttttactttcatcacgtttgctaatgagccattgactcaggaaagacatggccagatttaagagatgagggaatatatcccacctgttggtggaaagatctctgacaccacatggcaaagataagaatgtaaggggtggggggattatggccgtttttatcgtctcccatggaaaggaaattcactggctctgaacagtgctaatcaaaattgttactgaacatcataaagaacgtgaggagaggcctctactatgcattatgttcatagaatccttaatggaaaaaagtttgaaaatactgactacttggtgtctagagccccctccagctttagtatcctgtgactaagaaatatcacttgtccaccaagtgacatctagagactcttcatcaataatatgagatggaatcatgggaacatgtgtttgaacacaacaccttgtggatcaggttctctgcttcacagcggaatgcttatgcttagaatttttgagtgctaacaagtgaggttgagtctgtgagctgcttgtctcaaaactagattctgaaaatttgcagccactgctacagtcttggcttgtagttttacattgaattattggactgaattatttcattttgtcctggcgtgccttatcaactgaaaatattgtcccagagagggagcacaacaatattttgtaaagaaatcattcctgcagagatgtaaagactggttagtaacctgagtctctgacccactgtagcaaacagacacacaggatgctgagaaggatccaggactcactaagctgcttaactcaaaaggaaatagtaaggtttacactggcgacatgaagctgagtctcctttgggtctggagtagattttggtctgtgcttatgaatcgtctctgcacagatgaaataatagacattttaatgactgttcatatttataattatattagctttggatccaggttagaaattcttcattcctcctgtcaagaacttgcataaccctgaatggtgattagtaatgctagttaagcatgctagttcattttcaaaatctgttctattttacacacacacacacacacacacacacacacacacacacgtagagtcattcattcactcattcattcatttgataggaagttaagtggcatgtagtagacatctgttgtttgtttttgtcaccccaaatctgtttgcttttctcctgacaacaccattctgactttcttttggggaacatacccttgctcccattctcactccaggttcttcagatggggtgagttcatgggtgggcatgtgactcagcctcggccaattcacacgacatattctcctggccatggtggtgcatcagaggtggcaaactctcaagccaaagccagtgacatgcgaaagaactttcactgagactgttgagacagaggccgtctgccctttcctgctgattataacttggaagaagaaagccctggagatcttggccactgatatggtttagctgtgtccccacccaaatctcatcttgaattgtagctcccacaattctcacatgtcgtgggaggggcccggtggtaggtaattgaatgatgggtctttgccatgctgttcttgtgacagtgaataggtctcatgagatctgatgattttataaaggtgagttccctgcacaagttctctttttgcctgtcaccatgtaagacatgccttttaccttctgccatgattgtgaggcctccccagccacgtggaaccatgagtccattaaacctctttcttttatgaattacccagtcttgtgtatgtctttattaacagtgtgtaaacagactaatagagccaccatctctctaccacatggagctccagaatgaacctgatgtataggaaattaagaaagaggggaagatatgggatccttctgacatttgattctaacccccaccctgaccttttcagatacaggagtctatatattgtcttttattttcttaagacagcttaagttttctggaacttgcttctgaacattctgttacgtcatttttaaatacttgccaattatttttattagttactcatcagggagggaaatcaaaccagctcctgtaaaaagaatggaatttcaactatccagagtctcaaatctaaaaataggtggctaactcatgtcagaagtatgaaccctcagttccactaaatcccaatcttcataagtggaagcccaagaatctctattaaaaaattttaaaagcttgctagtttatgatgtatcctgcttagcacctgttcatggtctatgtcccagagatattttgaatatcacatgtaaaggggaaaggaaataggatatatttttcactttctgtaggccagatattttttgaagtacttcagcatattttcatgtaagatatttaagaaaaacttttgcatgcatttcctcagtgttctaggtataatactttagattactggttgctcagtagggaggaaaaaaaaaaaaaacagccctgatctcaaggagcttatagtctatcgcatccaatagaaatttctgcccttaaatgttccacgtctgccctgtccagtacattaaccatggctattgggtatgagaaatgtggctagtgagaaatggatttttaaattgtattaatttgagtagccatatgtggcttgtggctaccgtattgaaatgtaaaggagtgtacatctaggttatttcttcttaaacttgcatgtgcgtatgaatcatctatagatcctgtgaacctatagatctgatttagtaggatttggtgttggggtggtggttctgcgtttctaacaatctcagaagtggctgatccatggaccacaccgagtagcaaaaataatcatcaaagtaaaaaagttaattacaaaatatggtaagaccatagtggggacaagatgctataagggagaacggaaggggaagaggggaagggtttgcgactcaatttaaactaggaggggaattatagaaggcctcactggagagggggccctggagttgcagcctgcaggatgcagatgagctagttaggatacagaggtgaggggaggcagtgcgacagggagcagcagtgggtgcgaaggcatctcaaccacttttatgaaagaatctgtgaaataggcgagtcatcaataatagaattatcattacatttagaagccccttactaagccattcttctccttgacctccctgacaggttcaggtaggtgcccttctcagtccccataactcaaggcatattttcccataatcattaacaccttgagttgaaatgtgccctctatcagtctctgctgcccactgaactgtgaacccttaatgtcattttattctctgcatcctcgcatggtaggcattttacacatatttgtcaaactgtagccaaaaagtgtgtttgtgtgtgtgtgtctatgtgtgtgtgtgttgtgtgtgtgtgtgtgtgtgtgtgtttatgaggtatcagggataaaagaagtagatatactgcatatatagatgtatgcattatttttctcctaaagagatgagaaatatttttggagttgagccaagccattcatggcctctccattacttttagttttatggcagaggattgctctggttttgacaagcactaattaattccatctctggggaataatgggaaatgcaggcttatgctgtttgcaccaaggttatcagttatattggttttaatgttctgccctgctctagatataaaacatgcagcaaaatgcacagccacctcctcattagctgtaaacagtgtatttcagatttgtcaagcatacatatttatttttacatccaagcatttttatttatcttccttgcaagtccatgaagtttttgccaataaattaggaatgcagtaactagttctgaaaactatggcacacaggaaattttattgatctcataatttactggatcttttggttaattacaagttctgtctagcttagtacactttttgagccagctgcgcatcataaatatgtaacctcagtactcaccctccctacattgctgacagcctcccatgaggtcaaaggtgtaatagctacaatacccagagcctctaacatgtttaattaaactattaatctacttttatctgtgacactagaaagccagctacattgaattttcagagttcttcaatgcatttgcttacggtaaatttttccaagccatatctttaacagtttagcgctggcaacccttttaaaggcattttgaaaaattgtgaatgttggaggaattaccatatcagctaataagaaaatgtatcatttataatgattcatgaatttgagtctaaatgcagtatatgactaaggcactttattaaaaaaagagaagacaggtttgctaaaggtttgaaaattgtagtagatcaatcagcagcagcctcagaagtaccattattttaaaattgtgtggatgatcattagaagagaagtcatctttgttacataaccttcaggaacttgctgaggacaagtgtaacctcttgtggcagtgatgacattttcagtgatcaggccagcttttgtgttcattaacacaacagagcctcaaaactttagttttgagaaacctgtgtatccatgaagctttaattaggttaacaaggtacccattagtctatctcctttcttgtgtatcaaatggcagtaatctactacagatgttatacaatgaaggaagcaatttgctgcttttcattttatttcctgtactcactcatgagcttgtggatatagaattatgtgaaaaattcaagattctatttttattcatgttaagctcatcttacctgtttgtacaattttttgctctttctttattaaaggaatctgcatcttatgtgcctccataaaagctgtaaaaatatgacaccacgaccttctaactaaagtacctggctttaattttaacaatgattaacagtgatttgagtcatgcatttgaacattccacttaaaagtcaatttagacaggcaatgcccatgcaaatattgattataaacccactgtgtttctagcaagctagattaatatcatgggctaaaattcaaaaatctatttttcttttctacttcattaaagagtataaccaaaaaccacatctatttgcagattggtcatatattttgcaaatgcctgtgggactgaaatttaatttactcaacatatcttccctcccaccctacctccagtcaaaatcatcaaaaccagaactcttgttacatttatggggcagttgaaactgtatatttcactttgttttattgcactttaactttttgcactgtattagctgtgagtattccatggatcttgttaaatgtgagcagcttccttgaaaacaagtcatttcaatggacatgttttggcttatgttcagtattttacagccaatgtatcagagccataagtttataattttaaatgccgcagatcttacttattcatcatgattagatgtttctatctgctattctattgaatggcaagctctaatactgataaataaagagagccagttcctgatttggcaacaacaacaacacgtactgaagaaaataaatgcgttgggttcatctccttgatggggatgcaatctaagtcaaatttttgaatgaccactaactatttgcataatataacatataaattgatgactttgggatatttatatcatcctggtgcctcaaggttaaaattagtagtgtgaaaagataattactagctatgttaaataaaatgagtttctagaatgcatttttatgcaatttgtgagtacagagctattaaaggctgtagttttgttttggagaataagttgtctctttggactattgtagtaatctctttgtaaatgtttaatttttatcctagataagcaagatcttttgggctctctttcctactgttctgggatgaaagcatctaggaaatttagagggcaactccaatgagactgtctggctcacagaaatgaatcaacgatagaaactcgggcatgcggtggtggggggaagtggggtggaggtttgtgttaggggagtggcctatcagctttgacatgtgtggccatcacttatgcagtctccccatgaaggcaggtccaggtagctctgcagcagagctggggcaccgtgcctgctctcccaggcagagcctttggtgactactgctactaccaggaatagctgtggatagagaagagaacactggccactgtgtgggtgaccagaatcccagcccatacctcagtttcattgtcttctatggcacttcaaacccaaccctcaggaaaaccaaccaaccaaccaaccaaccaaccaaccaaccaaccaaccaaatacatccttaggagaaggatcagaactaacaatactgaaactttgagattttcgtttttaccttataaaaatgtattttggccaggcgcggtggctcacacctgtaatcccagcacttggggaggccgaggcaggtggatcatgaggtcaagagattgaggccatcctggccaacatggtaaaccccatctctactaaaaatacaaaattagccaagcatggtggtgggcacctgtaatcccagctactcgggaggctgaagcaggagaatgacttgaacccaggaggtggaggttgcagtgagccaagatcacgccactgcactccagcctggcaacagaaccagactccatctgaaaaaaaaaatgtatttcaagttactgcatactcatagctatatatttcacctgagatttacctggttaaataacttgcctgagaacacacaagtagtaaattatagacttaagatttgaaattgaattagtgtgtaaaccaaagtccatatctaagctgggtgcagtggctcacatttgtaatcccaacaactcaggaggctgaagcaggaggatcctttgagcctaggagtttgaggctacagtgagcaatgatggtgccactgcactccagcctggacaacagagcaaggccccatcttttttttttttttgagacggagtctcgctctgtagcccaggctggagtgcagtggcatgatctcggctcactgcaagctctgcctcccgggttcacgccattctcctgcctcagcctcccgagtagctgggactacaggcgcccgccaccatgcctggctaattttttgtatttttagtagagacgaggtttcgttatgttagccaggatggtctcaatctcctgacctcgtgatccgcctggcaaggccctatctttaaaaaaataaataaataaaatgtaaaaagcctatgcctagttcactatataatgatcctatccatggtaaggaaacacctttcatgattatcagggcatcctttatgagcctaactgagagagagaaaggaaggtatggcaggatgggagtgtagtgggcacagtggtgtgttgggaaactgataatctaaaataagcaataaagcaaacagcataatgagctctgatttggagtgttttcctattttctatgacaggaatattcccatcatggccaatttcaagcttccaaagtgaggtcattgaatgtggagttgaaaagagattgcacaggctgggtgcggtggctcacgcctgtaatcccagcactttgggaggctgaggcaggcagatcacctgaggtcaggaattcgagaccagcctagtcagcatggtgaaaccccatctctactaaaaatacaaaaattagctgggtgtagtggcacatgtctatagtcctggctgcttgggaggctaaggcaggagaatcgctggaacctgggaggtggaggttgcagtgagctgagatcatgtcactgcactccagcctgggtgacagagtaagactccatctcaaaaaaaaaaaaaaaaagagatgcacagaatcagctcagacgaactggcttccacatgccactgagcagggagcacacatgtggccaagggaaagaagggtgaggggtggtcagggaaggagtgcattgctcatagcaggtgcaccaggcaaaggacactcaaggaccccaactcccttgcctttactgtggcagctagctgccttggtggcccccatgaactgcaccccccaaggttcatgccctatgcagttttatccccttgggctgagcctgtgacttgcttaaaccaacagaatgtggcagaagtgatgctgtgcaggttctggagctcagccttaaggtggtgtagcagcttctgatttagcactctcagagctttgagctgccctgtgagaagcctatctaccctgctgcaacagaccatgtggaaagaccacacagagggaccatgcaaagaagcagaggccctgacatcacatagaggagagtcaaggagtccatccattggaggaaaattggggctccagacagatgaccctcggagagccatcccagcagaggcaccacacttgggagcaaagagcccaccttgaggattcctgctgtgcatcatctgaattccagacctgcagaaatgtgagaaaataaaatgttgttttaagccactgcattttgggacaatttattaagcagatattgacaactgaaattattcttttttaaccaatgcaggaatcttatttttacttaacctatgatgttttatggtcagagtggaaagggaagccctgcccctgaagtcatggatgcaccatggaacccgtggggacagtcaaggtcaagtcctccaagtaactggcatgctattccctgcttcctgtgccttcctcctggtctcataaaaaaagtgcatgagaatatcatgggtgatggctttagcattggatatcaccatttccctttgcagtgacggtgtttccaattgaccaaaagggaaaaattaggtagagagcaaagagttctctacatgattgttcaagaaacagaaataaagtatcaagtctgtaagcccagggttctttggagtagtatcattcttaccttggtgacagtttggtgaggattttactgctgcttccttctcctctcatcaactaaacaagaaactatgaagtccctttcctcaaggaaagggactgtcctgatagaatacccgacctatatcatgacttgttggaatattgtgaaagcacaaaattgagagaaaaataaagttatccaatgtttagatgctgaattacactgttgtgtaaccttgattggccactacctgtgaggtgagacactggagttagccattgtgaattcaggagtcagtaaacatccagaggtgtgaagcctgctgcaggcctccagttcccccagaaaacagtatctggttttaatgattttatcagagttgttttcaaggtcagtaagtttgttgatattttggtcatgagattagtgcgaaccaaccacatattggcatttaaatgactagggagataagatgagtgatgatatcataacaatagaacatattgatgatttcagagcagtaaaaaggctgaaaatggggcaatgatacttatattaaagacaaaataggaggaaactttcagcctttgaaaaattttcatttgaataaaactcatcacatgatactccccagtgtaccacaaaggagcatgtacattctgctgtccatttttaggagaaagaaaagtcataaactcaggctgccacctcagttcaatacagttgcaatgtaatgtttgaagacgctctcaagtctttgggaatgaagtgaaaacgtccactccaatcttcttaccaaggtacaggcaagtgtacacttgggtcttgtactctacgtttaaagctcaaatttacttgggtcttgtactcttggtttaaagtttgacttcaagatggctcatgtaaactcttctagccaagtcttcatatgtaatttgtggataattttatctctcttactacctacctgagggcattgttttaatgctcagaaacatacagaagggattgacaaagtataaattgctattcaaaaacaggggggcctagtgacaggtgagaaaacagtgctcctcagaaaagatcacccccatcctgctgaagtctttgaataggcaacccagacaatttaggcctgacattgtagctctttggtgaagaccaaataaaatgggattggaggagaagataacatattttcaattcattttagatcatttgcatcatctgcattaggtgtggcctaatttgtttggggcttcaggtgtatgaaccagtgctcattttcatattggacatagagctggggagatagaatggccagtagtttgcaggtgttatatcattttcctgtgatgataaggacattgcctttcttatggccattcaattacattttttgttctcatttaaagtaatcagagtttcatcgtgacgacttctatgtaaatttgaatgttacatgaggtgtgtaatggaataaaaatggagttacaaggactcctgttcaattgccaacatgcttcttttctattactagagatcgtagagtggctttggggactaagaagcttagacattattttgtaccttatcattggccatttttgtgattcccaaggtgatagattggtggccattcttctgaatagcccttccaaaagtcttggtatttttggctcagagtctttgcagaattgcatcatcatgaatttttacttttaagatagcacctgttttgtcaatcctgtgagaatatgtatttcataacatgtagccacctatgggattaagtaagtactgaggtccttgagccatttccaaatgaaaagagggtatgatttatcagggcagatccagtagttcaggggcagagctaagttctgaggtacaataaagagaaacgtaaaagtaggaacccacatttcaaccatttcttcttgtttttgaggatttaataggaaagatttttagactttagttgaacaaaacagtaagataacataaaatcagactccacttaaatgcttagtttggttttgtggaactggagcagctcatggggaaatgctaattggtcaaaatagataaataggaattccacagagtctgtgagaatgattagattttaatataaggcattactcaatagtagagtaaggattagtggagtggtacaagaattatagccattgtctaaatgcaaagatttttcttcatttttacaagaagaaacttgtgagctgactaaagttcaagtttagtatttcaaaccagtgagaggaccatgtttcattccacatgaagcttggttggccatgcaggtggaattttatcaaacaacacatttaaaattttactttcttatcatatttgactattgaaaacatgacccctccctgcaactctgtttgtgttaaagcatctgcggttaatggctttctgcttcttgtattgcaaagaactttaaaaagagatcattctctgaaaataagtaccttgctggtaaaatgagtttaacttggcaagctctgtcattttttgttgttattgccatcttatgttctggaagtaattcacattagtcatcttttagaaactctaagtcatgtcttccctgtcagatatcatgctctggtagcaatttattaaatatttcctgctaaaaatgaccccaggagatagtagttaacctactcttgagtgtaataatagaatcagagattgatgaacaattttcgccaaatattttaagtaatggcataaaactaaaaggccatgcattgcttgtcttagaaaaacagtacggaacatgttagaatattacgaataaatgaacactttcatttatgagctgtatatagaaatcattgagtttctctgccagagttgcagcctgtatggtagttaatcttctcgtggcacttactgtataatgcaatgcctctttgggcaatcttttgtgttaaaatacagcatttaagctccttctctccacaaagcattgcaagaatgaattgttcaatctctcttttttttgacatcatcctagaaattatttcagaaataaccaagatggtaattcccatttaatatctttctttattgctcattggaaaatagaaaatactttcaaagcatataaaattattggaaaattaacataaccctgtattgggagcaaaattattcctatctcagcattgccacccatctgagggacccagagcaagtcatttaccatccctcaggttgtttttttgtttgtttgttttttgagacaaagtctcactctgtcgctgaggctggagtgtagtggcacaatctctgctcactgcaacctccacctcctgggttcaaatgattctcctgccttagcctcctgagtagctgggactacaggcatgtaccaccacgcccagctaatttttgtatttttagtagaaatgggggtttcaccatgtcggccatgctggtctcgaactcctgacctcaagtgatccacccgcctcggcctcccaaggtgctgagattataggtgtgagccatcgcgcctggctgcttagcttgctgttatcattattattttaatcattaaaatgaaaatattaattttgtttcaaaatgaatggtgcatgaatgaaggaggtagtccatcttcttcctaccacccaaatgacagatgatttcttttcaaaatgaaggaaatattaatttgatgacctcaggattacttccattttaaactatccttctgtgtgtttaaatcgctttcctcatttttattttcttctatcccattccttcctattatattctaatgacctcttattttaaactccaaggaatgatggtccaccccagattggcttgtgatttcttcctatacagaggctttgtcatcctcattgtggccatatgccattcctcagtatgtaaagaaggttgaatggcagggatcagccgggtctagagaaaatctcagaccccatgacagtcaatagataggaaagacataggttgaatcagatagtgcaaaatgccatacctaaaagaaaatccccagaggctctttcaaattgtgagggagatatcttttgattagaggcaaatagcactgtcagcttgaagtgagcagactaggacggctaccacaatcatctgtgaaaattgtttaatacaagtgctaccttctcataaatcacaagggtaagctcatttaaaatggacatttattctgatttttgatccatattggcttaataaaagaccaactcataaggtttaacagttcaattaaggatttttcaagataaaggattatagataggaaatttccttgtgagctgggttagaatccatgggttgttaagtttcttttccgtgtggtaagtgggaaaacatatgctgtaggaggagatatagtatgcacttgaaagtaaagtgtaactattttttaaattaagatatgaccatttttaaaatttcttggcttaggaaaaaaattgaacatgcatgtttatatagaaatgttagaccatacatagcgttattattttgatgcgaaaggatgaaaattatctgcttttggtcaaaagagaggaaatcactcaaatcctttgggacactcatttataagctctatgaaatctttggtaaaatgaactccagaatttatgcgacttcctcaagaaaaagtagcttatttttaaaataaatcataataagtaacattattattattctcactggtggtataaggatcattaataaaatagagtctctgtgatatgtgcattctaatataaaatatacatatattataaatgttctgcatcgagtgaaatacccatatttatgaaaggggttgcatgggatccatcagcaccttgtaccatgaaagttaagaaactctaaatctataccacgagcatttgaattttctggcatttaagggagaagggaaggaaggtatcgtgatggagatggggtgggaaggaattgtaatgatctgctttttatttcttttatttgtgtgcaactagcacttcgaaagaacataagatagctgtaaccttctctgctaaaccaggaggtgaacacagatgtctgaaggaggctttataaggaagtgcataaagctttagaaggttcagaggagaattgagaggtcattgagagctgagatggagagggcttcatggagaagtctttacttgaatgattcccaagaacctagattgaatctagacaagggggaagactcatctctcatcacaccatactgacccactcctgcagctgtactgaatcttgtttcttctagtaaaccatgaccttctaacctccaggctttcacctggaactctttcccttccactactgcctgggtaatgactttgccatcacagttctgtcaagttaggactttcttcagaaagtttcctgtgaccttttccagccctctgacaatttcagtttgttgctcttttttgaggggctgagaaatctgcatgcaccgacctcatcactttgatggggtcagtttgctactcgatattgaaatggactgtttaggccttgatttcctcctatagactgttggctcttccatggcagagtatgtgtgttatttaccactttatccattgcacagtgcctggcacttattagttatcaataaatgtctgtatatttatgaaggaaggaagtaatgaaggatgaaatgaatagggcatgacctacaagggaaaagtcacacaggtggaaatgatgagttggcccaaagacaatgagatgattgatggacttaaactttaactctgatgtcattttctcctaaatgtgcaatatgccataatttttttcagtaaactaggggttgagacatttttgctacttaaatagagacagaaaaataggataaattgaaaatattttccagtggtaatttattagatgcctgtaaaagaaggaacatgaggttttcagggttcaagtggatgtctcattcttcaacacaaaaacacttggagagttgtataaaagatttgaaaatcactttagaaaacaggggctacttggggaagggagttgccaggaaaatgccattattgcaaaaagttcatttaaataggcttaatatatctacctatctagtgcccactatatatataaagcagtagaagggccagctgaaactagaataggtagtagaaaggggctttcaaccaaaagccacaattattagtcaaataaaatacaatttgttggccgggcatggtggctcatgcctgtaatcccagcactttgggaggccaaggtgggcagatcacatgagaccaggagttcgagaccagcctggccaacatggtaaaaccccgtctctactaaaaatacaaaaattagccaggcgtggtggcgcacgcctatagtcccagctacttgggagactgaagcaggagaaccacttgagcccaggaggcagagattgcagtgagccaagatcacgccactgcgctccagcctgtgtgacagagtgagactccatctcaaaaaaaaaaaaaaaaaaaaatacagtttgttgtatatatcataattgacaggacaagaccctgtctcaaaaaaaaaaaatcaccaaggaactttctttcttttatatttctaaagctagtttcttttttttttcttttttttttgcatttttttccattctgtgatggcaaaagaaaatctaaccaaccccaggattttcttagtcacttcaagtttgaatgcagccccttcagaattgctcctcttagtcttctctctgggactccagcccagggagcagctctatcacttaataatagtgtgtcttgagcaacttgttttatatatttgtgcctccatatctcattgatgaaatagatttaataatacctttctcaaaagatcactgtgagtattgaattacatgaaattgtatatatatatattttatatatatatatatcgcatagtgctgacaacataataagcacgtgataaatgatagcagctgctgctgcttctcttcctcttcctgttactatcacggtgatcaacaacatcatcatcataagttccaaaatggaagggcacagtgccttggagcatctggacaccggtcattgactttctattctgacattggttgtcctttggtcattgtcctacattcccatttgcatctgctgaggtttctgtcatgccatactctgaatcttcctcaaacagaacagatgaagcctcctcaggttggccagtgctccctgggaccacaggaagcttggggtgcaggaaggctgacttagactttgtattcttgacatactctggttttcaagtttcaggctacaaatttctgttcctctgcaattgccctggactcactgggaatttctaatgctcccgccacatgcaacatttgctaggtggtggcagcaggaggtgcaagtgtggggagcagggtggaaaaggactatactaaactcctgagctctcttcttcagctttcctctttttttggttaagtttaggaaagctggttgctcatctgttggttatacactcaggtttttgaaactcaaatgtcctttctctcaacttactgtctctctgtggaatttcaaaagtgaatgtagaaatttcagcaagaatttcccatcatttgctttctgtcctgctataattgtcatgcccattgcctgaggccatggtctctgccatgagtttagttttaacaagcaaaaagtaatgaattatcaggcaggaaaataatttaggttaatagtaaaatatttccttgctacatgacaaggtgaacagctgattgccataagagatctaagaaacactaaaaagtacaaaaaaataggacattagttgtcctttggacattgtcatatattcccatttgcattttctgaggtttctgtcgtaccatactctgaatcttcctcaaacagaacagatgaagtctcctcaggtcagccagttctccctgggatagaggaaccagggaagaatcaatgcatagaagcgtcagtattggaaatgggtcttgaaggagcaatctgatattgacagcagatgtatcagggagggaacacataagcaaactcatagataagtgaacatgctttgagatgtttaggaaaaagtgaagaatgtggtgtgttcagaatgtagattcccagggctgcttgattggcttcaatatgtgaagaatattgaatgccatagatttgtgattccatattcttctaaatataagttttaaaaataccttgatatacggaagaaaatgaaaatggcctctacacttattttgatgcatacaatgtgcgtgaactttctgaaagtgaatttgacatatatattctcaaataaattgccttttctttttcagtgggtcctatgccatatgaatgtgaagaggcaagggcaaggaattcacacaaaaaagatagagggggtgtttatggtcattaaaatatgaaaaacgtaaggtgaaatcttaacaacggttagtaatgctttttaataagcagctaatgccaatcactgacatttatcatatgatgtgttgtcgtggataacaagtatttattgctcacttaacatgtgccagtcatttcgctggatactaggaggacattgttcaaaaaggtagattgggccgggcgtgatggctcacgcctgtaatcccagcactttcggaggccaaggcaggcagatcaccggaggtcaggagttcgagaccagcctggccaacatggcgaaaacttgtctctactaaaaatacaaaaattagctgggcatggtggtgggcacctgtagtcccagctactcaggaggctgaggcaagagaattgcttgaacctggggggtggaggttgcagtgagccgagatattgccactacagtctagcctgggtgacaagattgagattccgtctcaaaaaaaaaaaaagatagattgggccctgctccttggaccttagcttttagagtgtggagtcacacaataaatctggacaaacataaattaaaaagataacagattttcataagatctgtggggggaaaaacagcattgtgattgtaatagagaacaactggggagcttcatgtagacaaggtgatcagcaaagatctgaaggagaaggttatatttgaattacaatctaaagaagaaggatttagccctatgaaaaatcagagggaagcattcaggcaaagaaaacatctagtaaaatttctaagattggaataagcttatacattcaaagactacatgggaggcagcaggcgagtgagccctgggggaggagtggtctggaaggacattggagaggcaggcagggtacagaccccaagggtctcaggtggaagtatatctgggagcaggggacaccttgcctcctctaaacactttctccaaaaggagaactctctaatggttggtgacgattatgaaaagatatggtggagaaagccctgtgagattcacagtgttgacatcagaagtcagtccatggggccagcaaaaggtgttgtcctctgtgataatcagttctatcccaaccaaaggcacagcccctccattcaccattgctgatcacaatcaggctgtgagaatcagctcgagcttagcctgcaagtcatggtcaggaactctagttgtgagtgcaatgaaaaaccatctaatggttttaggtagaggagcgcatgaccagacttacatttatgaaacatctgtgtctgctgtgcgcagaatgcttttggagacagggagaatggatataatcagggcagccaggaaggagacaattgcagcaacaccacaggtgaaggcagatgaatggtgctctaggatattgacaattagtatgacatgtggcagatagttttgtaggtagcatagacagtttttgcaggataatctgggatggcaagggacaaaaggaagggaaaaatcaaggatgattcttaggaatttgatttaggaaaatgatgcactgtggtggtgtgatttactgagatagagataagaaacaagttaaagttccattttagtcatgccaagtatgggatatctctaatctgactagagtagagaccaagttggcatttggatatagggtgagggcagcaccataaggatctgaatgtcgagggaccagactgggctggaaaaatacatttggaagacataggcacatggatgatatttaaagccatgggctgaataaaagcacatagagaatcctttctttttaataataactgtgagtatgaatttttgaacaccatgaacccacccctttccctagtataatgtctccctgaataagtggaatgttctgtatacactaaattaaacaactgtggtcttgcctctaaaaactcaaaatctaaaatagaccatgatgacatgaccaaccaagactccatctctcctcttttccctgagcctttgtagtaataactcatcctagtattacagtctgcagggacctttatatttattatgtcatttttcttttttgtccttgcagccatccttgaagtgggaaggttgtgtataatctcttatttgatggactgagcaagtctctaagcaggtatttttattcctactttaggtatatgagaatgcaggccccaaaagattaagcaacttctctggtcaaggttacaaaagtagtgagtgggattgacagagggaaagttgctctgacttcagagttctaaggggtctagttttagatgaaaacctcctggatatgtcaatcttcccaaagaaatagagcagcaattaagagcaactagactcaataagaattgagtcatttccctgctcttcatttgttagttggctgaccttggatgtaacacaagcatcatagccttgatttttcaatctgctgaacaggatgctattatctacctctcaggttatttgtaaattaatacatccatctatttactcaactatccacccactaatttattttttcatgtatcaaacgtattatatactaaactcctactatgtgccaggtaccattttaggcattgggctacatctatgtagaaaataaagcgctgcccttctgggacctgtatcctttggaggaagccatcaatgactagtcaacaaattaatacaaactagaacattagatggtgacaagagaaaatatagcagtcctgtggctcatgagaaattggggaaagcttctctaagtagggacatagacaaggattaaatgagataatgcatggaatgtgcttagcatggtgcctggcgctcactagggagccacacagtcctggaaagagaagagttgaaaagcaaacatggatgttgcccagtacttcttgcttgctgcccagcctagagagagcctctgcttttggggttctttcctcccactggctaagttatgagataatttctgaccgctttatcctatgtcattgagcatgtaatgactccaactgctgtttttctgaatctgttctcaccaaacaccttctaatcatgatttaatttctcatgtcaacctgctcacctgcagagaatattctgatcatatagttttcaagtaccggacctcggttcttagatacttttcattatatgatcatatagagacactctaattataattgggtttcctgtgtagtttggccacatggagagaatatgctgatcggatggactttgattattctagttcctgtgacagcttttgctcattgtacgttaagcagctgccatcctgattgaacacactcacctcctgaacttaggtaatgtcagggcctgccatgcggtaggcactcagtgaatgtctactgattgatggattgagacttctctcaggcccatggcaaaatcaaacttccaagggtaaattcaccagggggatgatgaacataaccctcctaggcctcccaagagccagcatgcctgtctttcccaggcatccacccactgtcacttcatagactgagcacaggggccattttttctatatcagcaatagctttgaactcttgcttcaacctattccagggttgagggggaaaattagaaagtcaagcagggtgacagcagaactgtgaagaactgtgcttctcactccaagtaagcccagctgccaggcaaattcaagagcagaggtcccaaatgcagttatatttctgggagcaatgcttccctttatcttcagagccctggaagcgcagagaaaagaaggtgagggcaggggtagggtggtgggacccacttggctcctgttgatggtaaagaagtacaggacctcaagtcctaatgacaaaagtaatagtaatatgattcacttatgactcagcagacattacacttcatacttgatcctatcatttcccttaattttacccacccaaaggccattgcatatattagctggtgatagggtttggctttgtgtctccactcaaatctcattttgaattgcaaccacatgggtagggaggagcctggtgggaggtcattggattatgagagcagtttcccccatgctgttctcatgatggtgaatgagttctcatgagatttgatggtttaaaagtgtggcacttcccactcttctctctctctcctgctccaccatgctaaagacgtgtttgcttcccctttgccctccgccatgattgtaagtttcctgaggccttccaatcatgcttcctgttaagcctgcagaaatgtgagtccattaaaactcttttcttcatagattacccagtctgaggtagttctttatagcagtgtgaaaatggactaatagagcttgaaaccctcttctctttgattcaaactgacaattttcagaaatacataatgacaatttctggctttggggctaaacaaacactacgcatgaactcattggtttctctgtgaaacagagcccagtcactttatctctctgcgcttcacaccaagagatagtgtcttgtatcctattaggtatgtagtagtattttgctgtttgctacctgtggattcattcctcctgtggttcactttctataactattcttgagggcaggacttgatgattggcaactgatagagatttccattcctctactttcccagctcactctcttctcacatttactgctggctacttgccctgtgaagccgagcagaatctggaaacttcatcttcactaagccatcaataaatggagaaaactgagtaaatataactgagacccagttgttaaaaacaagagaccatcactgatcatcactgatttctttcctacaggtcatgttgtcactcgtttcttttatttcttttttaaaaattattattattattttcataagttattggggtacagtggtatttggttacatgaataacttctgtagtggtgatttttgagattttggtgcacatatcgcctgagcagtacacactctaccatatttgtagtcttttaatcccttgcccccctctctctcttccccccgagtccccaaagtccactgcatcattcttatgcctttgcatccttgtaacttagctcccacctatcagtgagaacatacaatgtttggttttccattgctgagttacttcacttagaataatagtctccaatctcatctaagtcactgcaaatgctgttaattcattcctttttatggctgcatagtattccatcatatatatatctcacagtttctttagccacttgttgattgatgggcattttggttggttgcacggttttgctgttgtgaattgtgctgctataaacatgcatgtgcaagtatctttttcaaataatgacttattttcctctgggtagatacccagcagtggaatttctggatcaaatggtagttctacttttagttctttaaggaatctccacactgttttccatagtggctgtgctagtttacattctcaccagcaatgtagaagtgttccctgttcaccgcatctacaccaacatctactggtttttgatttttttattatggccattcttgcaggagtaaggtggtatcacattgtggttttgatttgcatttctctgatcattagtgatgttgagcattttttcatatatttgttggccatttgtatatcttcttttgagaattgtctattcatattcttagcccacttttggatgtgatgtttgtttttttttcttattgatctgtttgagttcattgtagattctggatattagtcctttgccagatgtatagactgtgaagtttttctcccactctgtggattgtctgtttactctgctgactgttccttttgccatgcaaaagctctttagtataattaggtcccagctatttatctttgtttttattgcatttgcttttgggttcttggtcatgaaatccttgcctaagctaatgtctagaagagtttttccaatgttaccttctagaatttttatagtttcaggtcttaggtttaagttcttaatccatcttgagttgatttttgtataaggtgagagatgaggatccagtttcattcttttacaagtggctagccaattatcccagcacaatttgttgaaaagggtgtcctttccccactttatgtttttgtttgctttgttgaagttcagttgtctgtaactacttaggtttatttatgggttctctattccgttccattggtctatgtgcccatttttataccaataccatgctgttttggtgactatggccttatagtgtagtttgaaatcaggtagtgtgatgtctccagatttgttcttttttcttagtcttactttggctatgcaggctcatttttggttccatatgaattttagaattttttttctaattctgtgaagaataacagtggtattctgatggggattgcattgaatttgtacattgcttttggcagtatggtcatttttacaatattaattctacccatccacgagcatgggatgtttttccatttgtttgtgtagtctttgatttctttctttttttcttcttcttctttttttttttttggagacagagtcttgctctgtcacccaggctggagtgcagtggagcaatctcaggctcactgcaactcctccatctcctgggttcaagcaattctcttgcctcagcctcctgagtagctgggactacaggcatgtgctaccacactcggctaatttttgtatttttagtagagttggggtttcaccatgttggtcaggctggtcttaaactcctgacctcgtgatccacccgcctcggcctctcaaagtgctgggattacaggcatgagccaccaagcccaaaagtctttgatttctttcagcagtgttttgtagttttccttgtagaggtcttttgactcctttgttaggcatattcctgcgtatttttttttcagctattataataggggttgagttcttgatttgattctccacttgatcactgtttgtgtgtagaagagctactgatttgtgtacattaatcttgtatctggaaactttgctgaattcttttatcagttctaggagctttctggaggagtccttagggttttcaaggtaaacaatcttatcatcagcaaacagtgacagtttgacttcctctttaccgatttggatgccccttatttctttctcttgtctgattgctccctctaggacttccagtactatgttgaagagaagtggtgagagtgggcatccttgtcttgttccagttctcagagggaatgctttcaacttttccccattcagtattacattggttgtgggtttgtcatagatggcttttattacatgaaggtatgtcccttgtatgccaattttgctgagagttttaatcataaagagatgctggattttgtggaatgcttgttctgcatctattgagatgatcatgtgattttttgtttttaattctgtttatgtggtgtatctcatttattgacttgcatatcttaaaccttccctgcattcctggtatgaaacccatttgatcaaggtggattatccctttcagatgctgttggattcagttagcttgtattttgttaaggattttagcgtctatgttcatcaaggatattggtctgtagttttcttttttggttatgccctttccttgttttggtattagggtgatgctggcttcatagaatgaattagggaggattccttctttctctatcttgtggaattgtgtcaaaaggattggtaccaattcttttttgaatgtctggtagaattctgctgtgaatctgtctagtcctggagtttttttttttttttttttggtaattttttagttaccatttcaatcttgctgcttgttattggtctattcagggtatctaattcttcatgatttaagctaggagggttgtatttttccaagaatttatccatctcttctaggttttctagtttatgtgcataaaggtgtccatagtagcctcgaataatctttttttatttcagtggtgtaggttgtaatatctcttgtttcatttgttggtaaggttatttggattttctctcttcttttcttggttaatcttgctaatggtctatcaattttatttatcttctcaaagaaccagcttttgttttatttatcttttgtattgtcttttttgttccaatttcatttagttctgctctgatcttgggtatttcctttcgtctgcgggtttgggtttggtttgttctagtttctctagttccttgaggtgtgaccttagattgtctgtttgtgctctttcaaactttttgatgaaggcatttagggctatgaactttcctcttagcactccctttgctgtatcccagagattttgataggtggtgtcattattgtcattcagttcgaagaattttttaatttccatattgatttcatttttgacccaatgctcatttaggagcaggttatttaatttccatgtatttgcatggttttgaaggttccttttagagttgagttccaaatttattccactgtggtctgagagagtgcttgctataatttcaattttcttaaatttattgaggccccttttatgtcctatctaatggtctatcttggagaaagttccatgcactgttgaatacaatgtgtattctgtgcttgttggatgaaatgttctgtatatatctgctaagtccatttgttctaaggtatagtttaaatccattgcttctttgtggactttctgtcttgatgatctgtctagtgctgtcagtggagtacagaagtcccccactattattgtgttgctgtccatctcatttcttaggtctattagtaatcgttttataaatttgggagctccagtgtcaggtgcatatatgtttaggatagtgatattttcctgttagacaaggccttttgccattatataaagtccctctttgtctcttttaaccactgttgctttaaagtttcttttgtctgatataagaatagctacccctgcttgcttttggtgtccatttgcatgaaatgcctgtttccacccctttactttaagtttatgtgagtccttatgtgttaggtgagtctcctaaaggcagcagatggtttgttgatgagttcttattcattctgcagttctctgtctttcaagtggagcatttaggacatttacattcaatgttagtattgaaatgtgaggtaccattgcattcatcatgctctttgttgccagtgtactttggttttgttttttgtttttgcttgtaacttgtatttttgttttataggtcctgtgtgatttatgctttaaagagttctgttttgatatggttccaggatttgtttcaagatctagaactccttttagcagttcttgtagtggtggcttgataatggcgaattctctcagcatttgtttgtctgaaaacgactgtacctttccttcatatatgatggttagtttccctggatacaaaattcttgactgataattgttttgtttaaagaggctgaagatatggccccaatcccttctagcttgtagggtttcttctgagaaatctgctgttaatctgataggttttccttcatgggttactggtgctgctgtctcacagctcttaaaattctttccttcgtcttaactttggataacctgatgacaatgtgcctaggtgaagatctttttgtgatgaatttcccaggtgttctttgtgcttcttgtatttggctgtctaggtctctagcaaggccagagaagttttcttcaattattcccccaaatacgttttccaagctttgagaattgtcttcttcctcaggaacactgattattcttaggtttggtcatttaacataatcccagacttcttgcaggctttgtttatattttcttactccttttactttgtctttgttgtggattgggttaattcaaagaccttgtctttgagctctggatttctttcttctacttgttcaattctattgctgagactttccagagcattttgcatttctaaaagtgcatccaaagcttcctgaattttttattgctttttctttaagctatctatttcattgaatatttctccctttacttcttgtattatgttttggatttctttgcattgggctacgcctttctctggtccctccctgattagcttactaattaacctccaggattctttttcaggtaagtcaaggatttcttctcggtttggattcattgctggtgaactagtgtgatttactggggggcgttgaagagccttgttttgtcatattaccagggttggttttctggttccttctctgggtaggctctgtcagagggaaggtctagggctgaaggctgttgttcatattttttcgtcccatggggtgttcccttgatgtagtactctccctctcttcctgtggatgtggcttcctgagagctgaactgcagtaattgtctctcttctgggtctagccacccaaggagtctacctggctccgggctggtactgggtgttgtctgcacagagtcctgtgatgtgaactgtctatgggtctctcagccacggataccagcacctgttctgctggaggtggtggagggtgcaatggaatccgtgagggtccttagctttggtggtttaatgctctgtttttgtgctggttggcctcctgccaggagggggcgctttccagaaagcatcagagccgccgctgtgtcccctgccacagccccgagtttgtttccaggcggagggtgagacgggcctgaaaacttgcccaaggccatccacctcccagctgcgaaagaaagggctttagttcttccctcctccacctgtgacgtctgcactccggatttgtgccctcccctgagttcttgccaggaggcttctcagctcattcaaattgttacaaagttcgactagagaattccttctccctgtggagttttaccccctgctcctctggccatccttccaatggatccttgtggtgccaggcaggaatgggctgcttggggacctaggaagcccccagggcctttctgctgcttcttctaccctcccccacacctttactcgactcactaacttgactcagctccaggtaaagtcagaaatttctgcaaacagaccttcagcttctccagtgggggtgtgtgtttgggagaggagggtctccctttctcagttccgcagttggggcactcaatatttgggggtctctcgggtcctgcaggagcagtctgcttcctacagagggtctgtgagtcctttcgggattgctggtttgttcttgcagttctgaagctaaaattcacaatgcaagcctctgcatgctgctctgtctagagctgcaatctggtcttgcctcccgtctgacatgatcccaggagctctctgagagagcaacccaaaggagctgagagagatccggagtccccgatgtgagggagcatcaggctgcaaggacgcggcactggcgatggtttcgcaggggcatctgttcccttggggcgtggaatccctgctctgccgctgccccaactcggctccgaagtgcctttgctgcaagatttcctgagcttagcagtctgcccgtttcttttctttctttctcttatttttccccctgaatgtttggtttctctggcaagcccaaacacgtaagattatatgtgaggcatatttatttacataaagatgcgtgttttttcttaactcagcatttacatgtagcttggccaagttaattaactgtagaagacctcaattttgttgtcttttaaaacaaggcagctgtattagattagtggttttcaaagtccgttagatggtaaagtgcctgcaagccatggcctgctttgtgggataccatgaaatattaatacccagagctagacttaataagcacacgtataattttgtgatcccaaatactatcttatatatgattgtaatagagacaaaagttagcatgtatggagatataaatcattaattcattcatctatcacataagtgttattgagtgcctacacaaatgtttctcaaaccagcattcaccacctggagaacctattaaaatacagatcactgagccccattcagctgtttaaccgacgatgctcatgttggttcagctgatctgggaaccaaattttgagaactgctgacctccactagtccagcccacgaattggcaaactacagcccctgagccaaatctggccctttcttctttttgtaagtttcactggagcacctcacatttatttatgtattgtccatagcagcttttgtgccacaatggcagagtttagtagttgtgacagagactatggcctggaaacctgcaatattatccgtgattttccacacaaaaatctgcattctgggttttgtatgcaataagtcatgtacaaaagtatggagctgatgtcctgatggagcttacattctaacagggcactaaaaatttagtgagatttaaagaaaagttataagagaacatcttaattgaggtattctactttcaattattcgtaaccttattattatatatttacttcttttaaggataacatcttcattcatatttctataactctagcgcatgttccaatggcttcaagtttgcatgattaaaatatctctaaactattcttttcctctcagtactttctcctttcagtgtattctaggtaacatttccagagaaaatatccttaatatagttatgaattgatgattgcctccagaataaggttttttaaaagtaattttgactttattttagattcagggcgtacatatgcaggtttgttatgggagcatattgggtgatgctgaggtttggggtgcagatggtctcatcacccaggtagtaaatagtacccaataggtagtttgtcaggctatgcccccttctctttctccccaaccagtagtccctagtgtctattattcacatctttatatccacgagtactcactgtttagctcccacttataactgagaacatgtggtatttggtttcctgttcctacattaatttgcttatgataatggcctctagctgcatccatggtgctgcaaaagacatggttttattcttttttatggctatgtagtattccagagtgtatatgtaccacatttcctttatccagtctaccattgatgggcatctaggttgattccatgtcttcgctattgtgaacaatggtgtgatgaacatacaagtgcatgcatctttttggtagagtgatttattttcctttaggtatctaccccgtaatgggattgctgggtcaaatggtatttctattttaagttctttgagaaatctccaacttgctttccacagtggctgaactaatttacattcccacaagctgtgtataagtattcccttttctctgcaaccatgccagcacttgttatttttttaagtttttgttaatggtcattctgacttgtgtgagatgatatttcattgtggttttgatcagcatttctctgacgtttagtgatgatgagtattttttcatgtgtttcttggccacttgtatgtcttcttttgagaagagtctgttcatatcctttgcccatttttaagggatttgttgttgttgttgctgttgttgaattgtttaagttcttatagattctggatattagacctttgttgaatgcataatttgtgaatattttctcccattctgtaggttatctgtttactctgttgatagtttcttttactgtcaagaggctttttagtttaattagatcccacttgtcagtttttactgttgctatcacttttggggacttagccataaattctttgccaaggaaaatcaacgttatttttcacagaattagaaaaaactattctaaagttcatatggaactgaaaaacaaaaaaagagccaaaatagacaaagcaatcctaagccaaagaacaaagccagaggctttacgttatccaacttcgaactatactataaggccacagtaacctaaacatcatagtattggtacaaaacagacacatagactaatggaacagaatagagaacccagaaataaagccacacacctgcaattaattatctgatctttgacaaagttgacaaaaattagcaatggggaaaggacaccctattcaataaacggtgctgggatagctggctagctacatgcagagcatgaaactggacctctgcctttcaccaaatacaaaaattaatccaagattgattaaagatttaaatgtaagacctcaagctattagaattctgcaagaaaacctaggagatacccttcttgacagaataaagatctgttctaattattccacattgtgacaccaaaccatgaccactactatatcttccacctgacatttcccacagtctcagctctgcatggacctgcccagaatggagatagcaatgggcttaccatgttgacacagcctctgtcacttcctattttctctctgactcaggaaggagtcacttcactcttgtaattcttctgccagaaccctggaggtatcttaacttacaacccccagtctataaactctccactaaagccacactgattgactcaccatcttccaaataaactttattgattatttgctactaatatgagttactgatgactaataacagattatctcaaaattgtgttcttaacacaataatagattttcctttttaaatcttgtagtttccgtggggcagagtctggggagtggcttattttggtagttcttgctttagggtgtttcatgaagttgcacttacaatgctgatctggattattcatctgaaggctcagctgggtctacaggatcctcatacagtgaatgcaccgttgagctggcaaattggtgctggtattgctttggacctcacctcatgccacggaggctactcctcacagagcaagtgaggcaagaaaagaaaacataagccacgatgtcttattttgtaaatttttaaaatttactttacagtgtcttttaagatatagccccagaaatcacactctattatttcagcaatattatatttttgacacagatcagtcttaattaaagtggtaatgacacaggagcatgaataccagggggtgagaatgactgacaccatcttggagccacaccatcctaacccctcctactctagtcagggcttttgcctttgctattgttttcctatttgaaatgtttgtttgtttatttatttatttatttatttatttaatttcctaaatctaaccaccttttaatgctcatttctgttccatcttccccgtgacaccttctctgaatcctttagcctgaagaaattgcatcttccattgttctcctgtggtctcattatcaatatcacacattttagcagttactcacagataggaaataattcctgttcacaaataaaacattctgaggaactcagttcttcctattcgaggaaatcctccactactactacaaaaacctgcataaggcattgaaaaaaaaccctccgttagagattgagctgtattgtagtacataatatagtatgagtaatattaatatggtgtatttgatagatgttagagatcagtgtctaccagagcagtactactcaaacttaaatatttatatgaatcatgtagggacctagttaaatgcagattgagattctgtgggtataaggtggggttgagatgctgccattctaacaagctcccaggtgatgctgaggctcctggtccatggaacaacttttgagtagcaaggtgctagaagatggacataaaatggacataaaatagaataggagttgaaagtagatggaaaataaaagtagtgaagagaatcatggctgtgttcaatcagtagtactggcaaggcataaatatttgaagtcacgaatcactcaagtatttctttattgctctttggtactgcccattatctttatacatgcatgtatgttttacctcttccagccttgattataggcccctttaggattgaaggtgttccagtcacccatagaggtgaaatatagttccctttctggagtagttgctcaataaatgtgtactgcttgattactctgctgctaattctcacggtcatttattaatttctattattacttccccaagttttctcctttcaaaatattataggaaattcaaaatacctttctattataaattgatgtgttttatttacagttccttatgatatataatacaattcctcataaaaaaataaaattttagttggtctaaataccaggtaaattaacatgatcaaattaatagaaaaagtatcatgcccaggtaacatgtcagaccaattaaatcagtctttgagagaggattcaggtattggtattttttaaagccccatgggtgattccagagtgaagcaaaagttgaggatcaccagtttaattatcatcctactatattttaagatagaataattatactttattttttattgtgccccaaagcattttttttttaaatggagtctcactctgtcgcccaggctggagggcaatggtgcgatctcagctcactggaacctcggcctcctgggttcaagcagttctcctgcctcggcctccccagtagctgggattatagtcaccctccaccacgtctggttaatttttgtatttttagtagagatgggtttcaccatgttggccaggctggtcttgaactcctagcctcaaatctcagcctcccaaagtgctgagattacaggcacgagccatggcacccagatccaaagcatcttttacaacatgtaatttggaaatatcaatgaagaccaattcagagaaaaatgtttaccttcctttttttttcttacaggatgtagctgcttcaatttataaataagtatagatatgctatagtaatttttgaaattctatagcaaactaacttttccataaatgaatatggtttcttaattatcccaagcttgttaatgtaggttgtactttttttcttttagcaaacacatcagatcattttgccaaattatccaagtcattttaaaaacataaagatattttgcaaatattttatatctgccagtcaaagtcagtcttggtcctaaataggatgttgttacatgcctgccttataaatgttagcatcacggaaagcatttttgtttaatttagaaatgtttgagctcagaggaaataaggatacttatctcgtttactcagctttagtaactgcaaaaggcagaataaaggtagcttgctggagttgctagaacccacatacagtcagaatatatgacctctcctttaagctctgcctcttactagctgggtgacctttggcaagtctcttaacttctgttagtctccattgcttcatttgtaaagtgaaagggttgaagtagacggcacataagattcttatacctggaaagtgatggggtgagggactactaaggtcctttgagtgcttcttggttacgcactgtgagaagtgatggaaaataattcacactctcaaaaattccatgactctataggagaattttcaagtgaacaggcacaaagtctctagattgttaaattaagcctatgaaaaatgaaggaacataaaataaaaagagagtaattgcattggttctgattctctcatagaaaaggaattttacacgtcgttaattccaatgctttgtattacagatgaggaaaccgaatcccaaaaagttcaaataactttctattactaacacataaaatagcacactaataggggatgaaaatttatccagtttaacaatccagtccttcatgtcaatcaaaagcttctttatcaccatcataattcaacatttcattctgtattgagaaggaggtggatctaagatttatatttatgatattcatgataattcagagtttctgaaactgacatcacaggaagattttcacaagtgggccaggatgtgattcatgggccctgatgttacaagtccagattggcaaaccaagggctgctatcaaagggactaagttggatggctttctggataaatatttctttgtagctggatttacaaaggttatcaaccctccagataaaaagtcatggttcttctattgccctaagagtcatagatagtaagttacacagtaacatattcattttatgtatatacatacatacatatagtcatgtatagtaaattacatgaaaacatcagtggtgccatacactcacctgatcctgggtgacggaaacgagtatgaggaatttaagtagtccttctcaaagtcttccccagagatcaattagctcatcaccattttaccatgagggtatgctcaggggagatatgtaactaaagtcctgataacttgtaccaggtgactgtaaatcattcagtattcagttagtcaacaaaatcaacaaataattatcatgcctctatagtataccaggcacttgctgggcactgggaatatggtgattaataaataagactgtccatgcccccagcttcatattctagtggaaagggaaagatatcaaaacatgtttgcaaggctgggcaaggtggctcaggcctgtaattctaccactttgggaggccaagtcgggcggattacttgagttcaggaatttgagaccagcctggccaacatggggaaaccccgtctctacaaaaatacaaaaattagctgagcgtggtggcgggtgcctgtagtccgagctgtttgggaggctgaggcaggagaatcacttgaacctgggaggcacagagtttgcagtgaccagagattacgccactgcactccagcctgggcaacagagtgagactctgtctcaacaataacaaaaacaacaaatacttacaaaacgtaaaaaaaaaaatccctttagatatttattagtgtgataagaaagatgagaaagcaaatgccatagagaatagagggtgaagagcaaaggctgcatggtgtgagtggtcaccgagttcttctcttaaaggcagtgatgcttaaactcagttgtggagagggacgcagtgtcaccaagttctgagggaaaagtgtttcaagcagaagaagcagaaaatgcagtggtcctgagatgagaatgaggagctctgcacttctgccagaagaggcattgtaatagtattggagatttgaaatcgttattttactcaggcatttattaattaatatattatttattcatcaaaatacatgttgagactactgtatatcatggcctattcaagacccagttcccctgcccttgtgcagcttagttcctggtgggagacacagacaataaataatacccatagtaaaaagcaaattatataatttgtaggaaaataaggactatggaaggaagaaaaatttgggtaaggaggaccaggagcctggggatagggaggtcagggagggcttggctgagaaggtgacatgtgatgcaactgagggatgtgagggaattagccatgcaggtaggggaaagagcatcctgggaagtggggacagagcacagacatgctggagaaacagcaaggaagtcagggaggcggaaacagagcaagtgaggagaagatagtgggaggtctcaccagagagggagccagaccctgttcaataatgcctcgacttgagcccagcatgctggctcacacctgtgatttcagcactttgggagcgaggcagtaggattgcttaaggccaggagttcaagaccagtctgggcacaatatcaaaaccccatctctacaaataaaaaataaataaattagctgggcatggtagactggacttggtggctcacacctgtgatcccagcactttgggagctgaggcaggaggattgtttaaggccaggagttcaagaccagcctgggcaaaatagcaagacctcatctctacaaataaataaataaattagctgggcatggtagcacatacttgtagtctaagcaactcaggaggctaagatgggaggatcttttgagcctgggagtttgaagctgcagtgagctatgactgcactccaacccgggcaacagagtgacaccctatctctaaaaataataataataataaattcattgaataatgccaggagtttttctctgagaggagtggataggtattacagggttctttgatggcaaagaaccgaggaatcttattatccccacctataggaaaagcacctagggaggctggctttccatgcagaggaggaaccaccagggggcggtgcaccgcaaagtcgggctgtggtggccctgcagatggcggtgaacgggaggagcaggctggcttttccaggctcccgctatctaataagtgaatagcattgcttttctgggaaaatctttttaaatgttttttaatatagaagacttttaaaaacattgaaataataactgtacctataggccaggtgtggtggctcatgtctgtaatcccagcactttgggaggctgaggtaggaggattgcttgagactaggagtttgagaccagcctgggcaacatactgagaccctgcctctacaaaaaataaaaataaataaattagctgggcatgatggcacaagcctgtagttccagctactcgggaagctgaggtgggaagattgcttgagcccagaagttggaggctgcagtgagctataattgcaccactgcactcccgcctaggtgacagagggagacctcatttccaaaagaaaaaacaaaatatattataatatttatgaggtatgtacagagttttaatacatacaatgtattaaagatcaaatgtggataattagcatatttatcacctcaaatatttgtttgtgtagagaacataaatcctctcttctagctatttgaaaatatataattgtttactgtagccaccctataatactatagaacactagaacttatttgtcctatcaggctctaattttgtattctttagcaagtctctcactaaccctccaaccctactacctaattctcagcctctagtaaccactgttctactctctacttctataaggtcaacttttttagcttctacagactctgatttaaaaacgggctaatgatccgtacgacacttctcaaaagaagacatacagaaatggtcaagaaatatattaaaaatgttcaacattgttaatcaccaaggaaatgcaactcaaaaccacaatgaggtatcatttcaccacagttagaatggctattatcaaaaagacaaaaaaaaaaaaaaaaaaacaattgcgggtaaggatgcaaaaaaagtgaacccttatacactgttgggattgtgaactagtacagccattataaagaataatattgaggttcctcaaaaaactacaagtctagatggctctttgacttcctaaaatgacaacagcaagctatacacagaattaaaatataaacatactcccaaagccatatataaagtacctgaggcagtccataaaattttaaatttcaatagagtactaatttaatcagggaaactttatctacggcattttttgctgtctccattaagcatgttatatgggctctcagaaccctgaagatcttcatccaaaagggaagttatactctcattttatctctaacagatgtgggcatcaagtgtttatgggcgtgaaaaaggctttccattaaaggaaaccctgtcaagtagcaggattttcttttattatgttgttttacacacaaaacattttttttgaaatcaccaagtctgcataaacctgaaaaaagcaaagtagtattttcataacacatatttgtctgtcactgctgtttttggcggaaattgtcccaacgagatctttgagttaccggtttctaagtagcctccagtcttgaccttccagaggcctcaaggacaatgatgtattggcccccagagactacttttggggctccagcattttgcaaacacatgagcaaagttttcttttcctgaagtcattttatttatcttcgctgtttccttccgcagccctttatagaaacagaattaaattgtattgggaataacaaggaggaaaaataattcacttatattttattgctttaatattttgtattagcattaccagtgatttatgtttcctgctccggtgtccccgttttgaattctccaagtctgtgaagggtgttgaagacaggtaatcggtaaataggctttcaagggagaatgtgtataggtgtgggtgaggtgaattaaggcttattttctcattgatctttcgctttgctttccaaagcagcggacactgggttgcacatctctgttcagttacagggaggggagggaatgcccagtaatttcttatctcgtggtatgttaattgctaaaatataaacaaaggtaagaaaggtgctttgtgcaggtgtaagtctctgggcatttgtccgtgactcacttctcagtatatcaagaatgatttctttcctccacagactaaccaagccttaactgtcaggttagccattctcatttctccctgcttggcctcgatcagctgctggccttccccgggagaaagagcctccatttgctatgagctccttgccggatggagtgattgccagcacatcccagtaagactgcagcaggtgctgcagcttggggaaatggcgtgtgttttccttaccagtacatgtggcttttgagctttgatttcacagaaatgtaaaaaacaggtcgatgctagtatgtactacattcctaccagcatacactttcaatccactttctgacaactggcttgtatcactccctgctttagagtaatagcacctttgcttgaagtttcttaggtgaaaatcatgaaggttcccattttgctgaatctctgtgttactgattaagagagagtaactgcgacaggggtgggcacctgacaacattttctaaataacattagcatgttttttcctcttcagccccctgggtttcaagcatttgatttgaatttttttccctactccctttcttaaaatgcatgactaagaaactgtttctttcttcactgatccttggttattcgctttgaaaaaagacgacagaacaagagtatttccaagaatacaccagtcctattctttggtgatgccactttctaatttaatgtgatccagcagccaaaatgttgttctaactaacatatctccttgctaaaaggtataaaacaggcatcttcaaactatttcttaagaaggctagagtcaatattttaagctttgtgggttgtactgcgtctttctcaactgctcaactctgtgttgtgcataaaaaagcagagctgtgttccaataaaactttattcacaaaaacagatggtgaactggagttggcccacaggccgaatgaccctgggtttggaagatgcttcttggaacttctggcccagctggtttccatctgcctttagctgattaagaagatgtggccaagggttccactgccacctcccccaccactactaatttttactgatcagattacacatcttatttttcactctatttgttctagacctatcactaacagggcaggcaagagccagggaagttgctcttaaaaaaaaataaaagacctggaaacccaaactctctatactgtggctttattttgtcatccaagcttggaagggcagctctcattttggcttccagtgcctgtctccattgccatttctccctctttcagtcctggcaggctgagagctttatggtctcctaaccttgcctttgcagcatcactagccctggtaataagaacaccatccatatactagccctttgacaatgaagaaagctgtccacatgtcttacctgatgtggtcctggtccaatcatttaagtaatttttaaaaattattttctgttttgacaataagaaaacagccctggagaggctgaatgacttgcttaagattctgcatctcatatgcagtgcaactaggcttcacctccactattctcactctaaatcctggtatctggcctctacctggtactgtttctcagtcctgagtcattaagggtctggcttcaggcactcctctgtcacattttttcttggatagattattaataccctgagatgccagataccattctgcagagagaagaagaaagccacagaaagccgttcaggctgagaatgtttaaaaatatatggtgctgaccaccaataccaatggcagcagaggaggatctttagtaaaggattttcaaagatatagagtctgtatctcagagtttaaaaaagaccattgctatacaagatgctccgatcagctctggttctcagtacttataaagcagcggaatctcctgctttatgaactttagttctgggcttcagctctgtattagtctgttctcacactgatgtaaagaagtagctgagactgggtaatttataagaaaaagaagtttaatttgctcatggttctgaaggctatacaggcttctgcttctgagaaagcctcaggaaacttacaatcatggcagaatgcaaaagggaagcaggcatgtcttcacctcgatggcaggagagagagagagagagagaaagaggaggtgctacacactttcaaacaaccagatctcgtgagaactctatcatgagatggcacaaggaggatagtgctaaaccactagaaaccacctccttgatccaatcacctcccaccaggctccacttccaacattgggaattaaaattcagcatgagatttgggtggggacacagagccacaacatatcagggtctggtctggtcaggggtaggttgcaggagactagggaccaaaatgatcttaccaaagggtgaaaaggtaaacacagaagttaaacagcaacactgaaaactcatagtccatgaaatccaaggggccaggagggaaggctgaaggttattaagattaagaagatcaaagcggaagacaaagttgggatatggagccagcagtagatgtgttctagtaaacacacacacatatgcacacacacacacacacacacacacacacacacacacacacacacggtataaatgatggaaaaagaggcagtggtttataaccatgccccaccagaaattctacctggccctaaattagtgtgtttaactatgcacattaaaaataaccaaccaaacaagcaaacaaaaaccagtcaacccaggcctgctgatatatctgcttatctccttggcaagggccaaccacagaactaagatgatttaagtagatctgtaaggtttctcttcccctgttttctgagtagagaaattcactggaaatgggattctttgctccactaagaagtccctggctcctgccactatccctttcctgcataattgtcttaaatcctctggtaaaggacattttagccaccttcttccagaagctacttttaaaaatatttgaagtagagatttgaagaaaagtggaataagtagccagaagccaaagatacttaagaaaccaagcagaggctctttcctgctaagaagaaaagttgggggatggtaagacaaacagagaagctgggtagttgcttaacgagatatagagcttttaggcttgattagggtcttaacaccttcctcatagggaagcactcactctgaatctaatgacattgtattcctatgacacatcaataaaatgcctacaggagaagcatctttgtacaaacttgtgccatatactttttaaaaatttttactaataaatatgtgtcatatattttactaatatgtgccacatactttactaatatgtgccatatacttttttattcctactaataaatatgcatatataaacatgatatagatatatgtgatctatatatgtataaatatatactgtgtgtgtacaagtatacaaattgtgtatgtgtatcttgtttaaagttccccagttttttcaattaaatactcacgaattttaaagagatcaagaagtcttctggcacttagaattgcattctactcaatgatatattgtaggtggaactacatacacattgttacattgttacaggaaaatgccagttaagatgttgtttaggaagcaataccaagggttcacaggtttatattagaaattagtgtctttagctcctttctgttgggatttaattttatgtataaaatgccattatgtccaaatattttataatgatgagaaaaccagttcactttggattatcttcattttttagtgtgattaaaaaaaaatctggctgcaattcttgtgcattagttaagaatgtgatggtgtgcagtcttttaagtcatgtcagcaaacgtgtatttccaaggtcagctctaccaaagagaatagtatttcttttgcaaccctgatcttacttggggatgaaaacaattattgcctaagttagaaatgtaaacacattaatgcaaaagaaaaatcaacaaaaacttatagtattaaaatgcacatcattttatgtgtgtatgtaaatgtatacaaattttactgatgtttttgcataaaaagataatcaaggctccatcactaccaaatttttagacatttagaaaggaactagacagtattttgtggttttcctgtctatgagataagttttgccagtaaatcaaacaatagtgcaatagacatgttgcatatattttgttagtttaatacctctttatcagcacttcatttagggacactctgctaattttacatactgtatgtcttaattaaataatgctgataattggaacgagtacaatgtattgagaacttatttgcctgccaagccctaatcgaagtgtttgatgtttttgttattggtcatttcatcttcgccatctttggaggtagatcattttatcaccctcattttacagataaaaagattcaagacttgctctgcctcctccaagcttgccatgcatatagtgataaacaatttaaggttatatcaacttctttaaaagtactaccccttcacagtaggttggcatttttactccaaattatgcaaggtgttatggcattttacattataatagcacagaaggtaaataaaactattaaattatttatcttcattcattacagatactgcaagagaaggtcaactgctaattctctttcaaccagcctgaagtagtgactaccattaaaaataaaaactatttaaaaatttgtcccaaatatccgcttaaaaaatgctttctgatcagttgatttaaataacgttatttggcaattgaaaggcttgttttgcaaactgttagaggaagaatctctcctacgaatggttttattctgtagtaaatgtctcctccagatacatggatttttaagccagtgtaaggtgtttaagacatggtcgattctagatatgtgttcgcattttgattacaagcaaatgttccagacccatttctatatttctcggacttacttggaaaggcaccaactaaagcagctgggagctgctggagaccattttaaatggttagttttcaggagattagcagggagcactgccttttgtactcaacactgagtttgaggtttttaaaagtgcacaagctttatactttacccccaattctattttacagtgttttaaaaaactttttttgttgagtcaccttattctttttctcgctcatcacaagacaaccctacttttaacaagaaacaacaaaaagaacagaaaagaataaaaactcacagtgaaagccatcaacgggttttctttttctgagcaccacttttggaggcattatcctttataacaggccctaagtgaaaaggaggaaaaagaaactttacatgattaggaaaggctgggaatgaaagatactgaaaggtgtaatgggaaatgaaaatatagtgatagaaaaggaaaagtaattctctgttggcgacaatgttatgttccatgacctgctcacactattttcttgtggacagcttcctcaaatcccattctgttgataaaagcatattaatatgatcaaccatgaaccagcaccaactgagaataccacttctctaggttggttgtaactgtttctttctgacttaaatactaaatatatcctctgaaataattacagttgtttgttacatccctttagttttagagaaaaattaaaactctcatttcttccttaaggaggctagggctaataactggagttgtatttctttttcattgtaagcccaatcaatttgatttctttttctcctaaatgaaaacataggctaaggccagcaaaaagccataattgggtgactaattaaatagtcaggcatctacagcctggtagagttcagggcttcctagttgaaggaaataaaaccataaactgctatctgtgacagtgtatatgaaagaggtgaaggatagagctgttgtgttcactggtggatggaactatgtattcatataactgcaagatttatggagataacatgattgggaaaatataaaacattaaatagattatgccagaagtcttgcctccaaatgtctaaatccttcaaatgtgtcattgccactacctgtggatcaaagaacaaaacagggatgtgagcgtgcagccctaatctagacacctgagacatgaggagtgcctgccaggaagaatttagaaggagcaggccaggagctaggaggagaaagaagaaagggtgacgtggattgtcaaatggggcctgagaattgacccttgcattgggtgaatggaggaccttgggaacagctactttggtggaattgtagggagggagcctgattcgagtgtgttcaagagtgactggaagcaacaaggacaggcaactctttcaaggagatctgctgtaaaggtagagagtgaacagaagcaatagctggcatggaaaatgggatcagcaagagtggttggacacagaaaggctgacaactagtagtggaaggtttttgatattgtggtcctgaaatgtcctcatagcatgttaatgtccatgttttttattgtgttttctctctttttttttttttttgttttgagacggagtttcactctgtcgcccaggctggagtgcagtggtacgaatttccggcccccaggttcaagtgattctcctgcctcagcctcccgagcagctgggattacaggcgctaatttttgtgtttttagtggagatggggtttcactatgttggccaggctggtcttgaactcttggactcaggtgatccaccagcctcagcctcccaaagtgctgggattacaggcatgaaccaccgtggatggccttttattgtgttttctaagcaaacaggcaagttattctttaatctcatttccttgccataaaaatatagcttaatttctaccaaaaacattggctcccaactgtatattaattatgattatgagttttaagtgacaattgcatttttacatagaggtaatgccgaggacatgaagttattttggatttcaggaataggtagtatttgttccaagccctgtggccatgaaaagccatctttgttcagtcctcaccaaggcaatgtagggtggataagcagtgtagggtggatcaccaaggctaggtgtggatcagcaagccttcctccttaaaaccgactctcagtcttgaacgcccagagggaagaggtaggaagtactgtttttcagctgtgatttcagaagtccacggatatttcaaaatcagcagtctccatcttagatccatgacttacgggggaagttataccccctaacgatattgcagaatagtagtaaatctaatgagagaatatatgagaagaactaaagtctgtccttcgattttccttgtgaccttggataagattgttggttatcatctgtcagctcagtggcccttctttggatgttaagatggtggtattaaccaccagaaatgttttcaaaaggcactctgcacattaaaggttctaattatccttcttcaagctagtgtcagtgctgattattaaacagttttctaatcctaactggcctgattttttttcaatgcagtccttcaaattatccttttgcaatgataaatctttcctaaagcatttaattctgcacacagagaaataccactgcttactcacgaatgctactgaacaaaagctatatttatttcttgttcaggttgtaaatattagaaatttatggatgatgatttcttaagaaataagcactataggctctgcaatgactggcagttctgttaaaagggattttgaacaagctttgaggcagagactcctgcagaagaatttatgcactttgccgactctaagaaggtactgcagcaaactaacagaaatttacttgttttcagcatgctgtcatagttgtgagtgaactccagagttttctttactgtctaagcagtctttgaagtcatctatttggtgattagctgtgatatgccttcctaattagggaaaagctattcaatcatctcctcacagattcctccaaaagcttgttttgaatctcagaaatgaccaattttaactaagcttcaatgaaatgacccacttaataaatttaaatacaatcaccaaaaataaatgttggtttgcttggcatcatgtctttccatctttttactttcttttatttttaaatttatttatattttttattgacacataataattgtacatatttacggggtacagtgtgatgttttgatacaggtatgcattgtgtaatgatcaaatcagggtaattagcatatccatcacctcaaacatttatcatttctttgtgataggaacattcaaaattctctcttctagctattttcacatatgcaatatctttttaattactacagtcactctactgtacaatgggacatcactacttactctttttttctaattgtaactttgtacccattgaccatcctctctttatctcccaatgtcccctaccctccccagtctttggtaatcactattctagtcactactttgataagatcagttttttagctcctacatatgaatgagaaaatgttgtatctgctttctgtgtctgcttatttcacttaatgtaatatcctcaagcctcatccacattgtcaaaaatgacagaattttattattttttatagccaaatagtattctattgcatatatttaccacattttctttattcattcatctgttgttggacacttaggttaattccatatcttgactattgtgaatagtgctgcaataaacatgagcaggcagacatcgctttgacacactgatttcattccctttgtatgtatacccagtgatgggattgctggatcttacagtagttctacttttaattttttgaggaacctccatactatttcccataatggctatatactcaaatttcatttttaaaaattttacatatcacctagttatttctctatccttctgccttctctgcactaatcacaaattgccctaacccagggtttcaattgatagaaccaaccgctgcatctttacacgcaacacattggctgattaaaaatcaatgcctcgttagagatgcaatttgtgttttgattagtgtttcggttatgggtttcctgtcctagaatgtctgccttaatcaactatttttgctttgaatcaccctggactattggcagtgagaggtacatctgcatgagtctccactgagaggcttttcttcctatttatgatacctctttgttcaccaaagggacaaaaattctggcaggtcttaattaatgcctgatgtaaagggatgattaagacatataaagccatggcttctgttttagcttttctaaaatgaaaatatagttgagagaagtgcttttttcagtagggtgtagcaatcaaaatcagcctggttcattgcatagttgtttgatttcctggacccattatgttggggttctgtgttttctttgttagtgctgtctctccactgaactttggtcagatattggggggttaattaatgcatttccaaaatccagaaaatatttttaaaacctcaaatccatcttcatgaaaacttttggctaatctatgttaagtaagtctcataacctacacatgggtgggcagattactctgtagaaagtaccttcatggcatgccatgagcatatcactatccttaaaagcacattcatggtgctggcttgtagacgtgcttccagggacattgcattgcaatggtctacatatctgaagtcttgtaacccatgagcatatgcaagaaagtttttcctcagaagcaattggcttgttactcacagacttcacagaatcgtcttgcaaatgttgtaggtttgccaaaatcttctgttaagtgatcattttgctaaaagattaacttcccaaatttctgtgcacttttaaagctatagtttcatccttgaccctttcttgatctctgttgtttttgaagaagtgtattttttagtacaaaaaatatatatcattgtagacaactcataaaatactaaaaacaataccaacgtgtccacaatataaagataactactgttaacattttgattgatttattttagaattttttcctaagttaatgtaaataatcatttttaatttatttttatcacaaatgagaatgattttataacacatattttagggaaattttcttttatctgatttataccctcacagtgtgtgtatgatttgtgtattttgggtggatcacacaaaccctatacataaaagagtgcatagaatgtatctgaatagtttacagaataattatcaaataaatattcctgataaccatcatccttgccaacaataattagcaaaacaggagcccctgattgcgtcacatttttcttctctaaaaataactactgtcctgacttttatattctactaggtgtccctaaaaatacagcatgtttttattgtttttgaatcttatataaatgaaatcatattatatgtattctttaccaaatttctcctgttgcttaaaactacatttgtgaaatgtattcaggttgttgcatgcaactttaattaatttgtctttaatactctatggtattccattgaatgaatttgccataatttatatattcaactttctcttaatagtcattaaggataatttcagtttagggctcttaactggtaatggggctatgaatggtttgggacatgtctgttagagaatatgtgcaaagttttactaatgtagatgcttatgagtagaattcccagggcatagacatcttcagttttgctagacaacgcccagctgtttcccaaggaggttgtaccaaattgacacttagaaatagcagtttcacatcctcaccgacattttgctattatcagatttttaaaaatattttgagaatctaaggtatgtataattttattagaaaatagattaacttggcattctcaaattactactgagtttgagcatatttctagatagcactatattaatcacttggatttcctttttgtgaagtatctcttcaggtctttgatccattttcccccttgttgactgtatttttcatatttatttgtagtagctatttatttattctgaatactagtactttgccaggtatatgtgttataaatatattttccatttcagtggcttatcttttttttattttactctttgcatgatatctttgataaagtgaattttataattttaataaaattgacataatccatctttctcttattctgtactcttaatattctatttcaagagaatttcataactctgaagtcatgaggctatcattttgtattatttctctaaaagctttgcagttttgcctttcacttttacatctttaatcgacctactattgtcaaggatgaactagagatatgattttatttcttttctatattaatatccagttgtcccattgatacttactaataagttcattctttcctttgttatgtgtcaaatgtctatttacctgcaaacgctctgtttcagtccttacatcaacatctcttgcccctgagttttacatgttaatacatagatgttcttttaaatgcagtttaccatcatcttaaaaaagaaaaaactttatttttagagcatttttaggctcacagcaaaggtgagaggaaggcacagagatttcttgtgtacccaccacccccacacaaacatagcctcgcccatttgcaacatctttcgtaacactgatacatttgttacaatccatgaacctacatttacacatcattattacccaaaatacatagcttacattagggatttctcttggtgctgtacagtctatgggtttggacaaatgtctaatgatatgtaccaccactatagtatcttacagagtattttcaccgtggtaacaattctctgtgctctgcctattcacctctcccgctcccaacccactgacgatcgctgatctttatactgtccccatagttttgcctttctaagaatgtcatatagttggaatcatacagtaagtagcctttttcagattgacttctttcacttagtaatatgcatttaaggttcctctgtgtcttctcgtggcttggtagctcatttccttttatagctggataatatttctttgtttgcatgtaccacagtttatttatctattcccctactaaaggacatcttggttgcttccaagttttggcagttatgaataaaactgctataaacctctttgtggtggtttttggaggacataggttttcagccctttgggataaatactagggagagtaactgctggattacacagtaagagtatatttagttttgtaagaaactgcccaactgtctttcaaggtactgtaccagtttgcattctcaccagcaatgaatgagactttctgttgctccacatccttaccagcatttggcagttgttttggattttggccttcctaataggtgtgtaatggtatttcaggattttatttcatatttacctgatgccacatgatgtagtacatttttctcatatgtctatttgccattctttgttggtgaggtatcaagatttttggtccattttttaattgaatggctaattttattattattgagtttcaagagttctgtgtatattttggatgatagtcctttatcagatgtgtcttttgcaaatatattctcccagtctgcatcttatcttttcattttcttgacattatcttttcaaagcagaagttttgagttttatgaagtttagcttatcaattacttatttcatggattatgcctttggtgttgtatctgatgagtcattgtcatacccaaggtcatctatgttttcttgtatgctattctctaagagtcttatagtttcacattttacatttatgtctttgatccatttggagtaaatttttggggaaggtgtaaggtctttgtctaaattcattttttttgtttttttgttttgcatgtgaatgtccagttgctccagaaccatttgcttaaaagactatctttgttctattgtatttcctttgctcctttgtcaaagatcagttgattatatttatgtgcatctatttctggcctgtctattctcttccattgatctatttgtatattttttcaccaataacatactgtcttgattactgtagatttacaataggtcttgaagttgagtagtgtctgtcttccagctttgttcttgtcctttaatattgtgttagctgttctgggtcttctgcatctccatataaactatagaattggccaggcacggtggctcacacctgtaatcccagcactttgggaggctgaggcaggcggatcacgaggtcaggagattgagaccatcctggctaacacggtgaaaccccatctctactataaatacaaaaaattagccgggtatggtggcaggcgcctgtagtcccagctacttgggaggctgaggcagaagaatgacgtgaatccgggaggcggagcttgcagtgagccgagatcacgccactccactccagcctgggcgacagagtgagactccatctcaaaaaacaaacaaacaacaacaaaaaaaaatctatagaattagcttgttgatatccacagaatagcttgctgagattttgaatctatagatcaagttgggaagaactgacatcttgacaatattgagtttttctgtcaaataatatgaaatatctctttagttctttttaaatttttttcatcagagttttgtagttttcctcatgtaactcctgtacatattttgttagatttatatctaagtatttcattttggggatgttagtatgaacggtaatgtgtttttaatgtaaaattccatctgtttattgctggcatacaggaaagcaattgacttgcatgttaaccttgtctcctacaaatttgctataatcacttgttagttctaggggtttttttgttgagcttttagattttctacgtagataatcatgtcatctgcaaaaaagatattcttatttctcttttcccaacctgtatacattttatttacttttcttgttttatttcattagtcagtgcttccaagagaatattgaaaagcagtggtaagagggaatattcttgtctcattcctaattctaggtaaagcttctagtttttcaccattgtcatgtaaattgtagattttttgtacatatacttttttttcaacatttattttagtttagaatccagatatctatatgtaggtcctgtaaaattctcattgaataatatgcaaagtctataatatgaatactgaaattttatttatttatttatattttatattaacttttattttaagttgcaggaacatctgcgggtttgttatataggtaaattgtgtaaatttacctatctaaaaatatataggtaaacctttatataggtaaatctacataattttatataggtaaatctgtacattatgggggtttgatggacagattatttcattgcccaggtaaaaagcatactacccaataggtggttttttgaatcgctctcttctctcactctccaccctcaagtaggccccagtgtctgttgtttctttctttgtgaccatgtgtgttaaatgtttagtttccacttataaatgaggacatgtggcatttggttttctggttctacgttagttctcttaggataattgcccccagcttgatccatgttgctgcaaaggatatgatcttgttcctttctatggctgcatagtattccatgatatgtatgtaccatattttctttatccagtccaccattgacagacatttaggttaaggtttcatgtctttcttattgtgaatagtgctgcaatgaacacacatgtacatgtgtctttatggtagaacaatttctgttactttgggtaacagaataatggaattgctgggttgaatggtaattctgttttgagttctttcagaaattgccacactactgtgcacggtggctcaactaatttgcattcctatcagcagtgtataagcattctcttttttctgcagctttgccagcatctgttattttttgatttcttaatgatagccattctgactggtgtgagatggtatctcattgtggttttgatttgtggttctctaatgatcagagatgttgagcattttttcatatgtttgttggccagtgggtgtcttcttttaaaagcatctattcatgtcctttgcctactttttaatagagttatttgttttttgcttgttaatttgtttaaattccttatacattctggatgttagacccttgtcagatgcatagtttacaaatattttttctgtttctgtaggttgtctgcttactctgttgatagtttcttttgccatgcaaaagctctttattttaattaggtcccatttgtcaacttttgtttttgttgcaattgcttttggcatctttgtcatgaaacctttgtcagggcctatgtccaaatggtatttcctaggttatcttctgggatttttatagttttaggatttaagtcttaatccataatccatatttaagtctttaatcttgagctgatttttgtatatgctataaggaaggagttcagtttcaatcttctgcatgtggctagccagttatcccagcataatttgttgaataaggagtcctttccccattgcttgtttttaacttaacaaaaacagatggctgtagataggcagctttatttctaggttttctattctgttccattggtctatgtttctattttggttccagtaccatgctgttttggttactgtatctttgtagtatacttttacatcaagtaatgtgatggctccagctttgttctttttgcttaagattgcctctatttgggccccttttttggtttcatataaattataaaatagtttttttctgattctgtgaagaatatcattggtagtttgataggaatagcattgagttggtagcttgctttgggaagtgtggttgttttaacaacgttgcttcttcctatccatgagcatggaatgtttttccatttgtttgtgttgtctctgatttctttgaggagtattttgtaattctcactgtagagacctttcatctctctggttagctgtattcctaggtattttattctttttgtggctcttatgaatgggattgcattttttatttgaatctttgcttgcatgttgttggtatatagaaatgctactgatttttgtactttaaaactttgctgaagttgattatcagatctaggaggttttgggcagagactatggggttttctaggtatagagtcatatattttgcaaacaggaacagcttgatttcttctcttcctatttggatgcacttttgtttctttctcttgcctgattgctctgactaggagtttcagtactatgttgaataggggaggtattcctccaggggaatgcttccagcttttgcctatttgatatgatgttggctatgggtttgtcttagatggttctgattattttgaggtatgttccttcaatgcccagtttgttgaggattcttaagatgaaggaatgttgaatttatcaaaagccttttttagcatctattgagataaccatgtggtttttgtttttagttttgcttatgtaatgaatcatatatattgatttgtggatgatgaaccaaccttgcatcctaagggcaaagcctacttgatcatggtgaattagctttttgatatgctactggattcagtttgctagtattttattgagaatttttgtacctatgttcatcaaggacattgatctgatgttttctttttcagttgtgtctctgctaggttttggtatcaggataatgctggcctaatagaatgagttagtgaggagtctttcctccaacttttcggagtaatttcaatatgaatggtacaagctcttctttatacacttggtagaattgtctgtgaatttgtctgatcctgggctttttctggttggtaggctttatattactgattcaatttcagaagacatcattggtccattcagggattcagtttcttcttggttccatcttgggaggttgtatgtttttaaaaatttatccatttcttctaggttttctactttgtgtgcatagaggtgtttgtagtcatctctgagagttttttctatttctgtgtggtaggtggtaatgtcccctttgtcatttctggttttgtttgtttgaatcttctttttttattagactagctagtgtcctataaatcttatttattctgtcaaagaaccaactcctggattcttttctatgtttttttgtatcttggtttccttcagttcaattctgattttggttatttcttgtcatctactagctttggagtttgtttgttctttctctagctcctctgagtgtgatattaagttgttaatttgagatctttctaactttttgatgtgggcatttaacactataacatttcttcttaacattacttcagctatgtcccagagattctggtatattgtatctttgttcccattagtttcaaagagtttcttaatttctgcctcaattttattttattgtttacccagaagtcattcaggagcacattgtttaatttccatgttgttgtgtgattttgagcaattttattagtattgatttctatttttattgtgttgtggtccaagagtgtgtttggtatgattttaattttctgaatttgctgagcattgttttatggttaattttgtgattgattttagaatatgtgccatgtgaagattagaagaatgcatattctgttcttttggggtggagagttctgtagatgtctcttaggtccattggtcaagtgtcaagttcaggtcctgaatatctttgttagttttttgcgtcagtgatctgtctaataatgtcagtggggtgtggaagtctcctgctattattgtgtggttatctacgtctctccataagtctttaagaacttgctttatgaatctggatgaccctgtgttgagtgcatatatatttaggatattaggtattctagttgaactgatgttcgttgtttattttaatgtagtgcccttctttgtcttttttgattgttcttggtttaaagtctgttttttctaaaattcaaataacaacccctccttttttctgttttccatttgcttagtaaatttttctccatccctttactttgagcctatgggtgtcattgcatgtgagatgggtgtcttgaacacagcatgcagttgggtcatgctttttttttttttttggatggagtttcactcttgtcgcccaggctggagtgcaatggtgcaatctcagctcactgcaaactccacctcccaggttcaagtgattctcttgactcagcctcctgagtagctggattacaggcacctgccaccacgccccactaactattgtattttcagtagagatggggtttcaccatgttggccaggctggtcttgaactcctgacctcaggtgatccacctgcctcagcctcccaaagtgttgggattacaggcatgagccaccatgtccagccactgggtcatgtttctttatttgacttgccactctgtgccttttaattgggacatttagcctatttacattcagggttaatactgatatgtacagatttcatcctgacatcatgttgttagctggttattatgcagacttgattgtatggttgctttatagtgtcaatggtctatgtacttaaatgtgttttgggtggttgctattggtctgtcttttccatatttagcactcccttcaggacctcttgtaaggtgggtctagtggtaacaaattcccttagcattttcttgtctgaaaagaatcttacttcttcacttataaagcttagtttggctggatatggaatttggaatttattttccttaagaatgctgactatagccctcaatctcttctggcttgtggggtttctgatgaaaggtccactgttagcctgatgggattctctttgtatgtgacctgccccttctctctagctgcctttaactgtttttcttttattccaacctcagagaatctaatgattggtgttttggggatagttctctcgtaccgtatcttgcaaggattctctccatttcctgaatttgaatgttggtgtttctaatgaggttggggagattttcatggaggatatctttaaatatgtttttcaagttgcttgctgtctcttcctctctttcaggtctgacaatgagtcatacattgggtcactttacataatcccatatttcttggaagttttgtttatttttctttatttttgtctgactaaattagttcagagaactggtcttcgagctctgagattctttcctcagcttggttgattctgttgttaatatttgtggttgtattctgaaactcttgaggtgagtttttcagctctatcagatcagtttggttgtttcttaaaatgtctattacatcttttatctcatatatcatttcattgtattgcttagattccttggattgggttttgactttctcctggatatcaattgttttcatttctatccatagtctgaattttatttctgtaatctcagccatttcagcctggttaagaacctttgcttagaaactagtatagtcacttggaggtaagaagatagagtaagaaggctttttgagttgccagagttcttgcactggttctttctcatgtgtgtgagcttattttccttaaatctttgaaatttctgtcttttggatgaggtttttttattttatattctctgatgcccttgggggtttgattgtggtataaggtgagttcagtcaactgggttgatttctggaagattttaaggggccaaggctcagctcagcattcctggtctgagtgctttaactctggggggctggtaccaggtccccacacttgttctctggcaccttgaggttagaaaccagctgcactagaaaggccaacgtgtttccagtccactggctacaacattcctgtgggaggtactgaccaaagcacttcactggggcagtggcagtgggatccatgctcacttacacatgctaggagccatggcattgcagagaggtgcacatgcgtcgcctggggcaggatactggcagaaacgagtttgcagcattcttttttttctttttatttttttttttttgagacggagtttcactcttgttgcccaggctggagtgcaatagcgcgatcttggctcactgcaaacttcacttcctgggttcaagacattctcctgcctcagcttcctgagtagctggaattacaggcatccaccacaatgcctggctattttttgtatttttagtagagacggggtttcaccatgttggccaggctggtcttgaactcctgacctcaggtgatccacccacctcggcctcccagagtgctgggattacaggtgtaagccacaatgcctggccaagtttgcagcattcttgcatgcccttgcaccacttgtggaacacaggtggggatggggttgctattgtctgtgtttgcactcacaccaatggcaatggcagcggagggttgagcaggattgctggtgtccatgtgtgcattcccactggcagaaatgactaggatatctctttactttaaagccactgtggaaacccaaatatgcatcctgtcctacaagtcagaacactgttgtttcaagcatcatataaacatttcctggcatcttcccagtacctgcaggtcacagagccacaatgactgctgcagagtcacctagggtttcctaggaaatggagcaatggacatggcatcccagctccttgcacaagaatcaatattctttatcaaggtccgatgttcccttctattcctagtttaatgaagcctttttaaaaatatcatgaatgcctgttgaattttgtcaaatgctttttctgtctctactaattaaccgtgtgacttttatttaatgaattagaataatttacttttgaatgttgaatcatttgtgaatattttgaatgttgaatcatttgtgaatatttgggataaattctactcagttgtgtataattttgtaatacatcattggactctatttgctaatatttgtttaggatttttacatctatgtttataagaaatagtggtgtgtagttttcctcttttttttttctgggtttgatattaggataattcctgcctcatggaataagttaggaggtattccctctgcttctgtcttctgaaagagattgtagacaactggtataatttcttccttaagtgttttgtagaattcactagcaaacccatgtggacctggtgctttctgttttggaaggttattaattattgattcataacctttcttaatagataaattaacaatttcttaatagatacaggcctattcacattatctatttcttcttgtgtgaattttggcagagtatgtttttcaagtccatttcatctaagttgtccattacatctaagttgattttcaatccctttcatctaagttgtcaaatttgtgggcatagagtttttcatagtattcttttgttatcctttaaagtctgtgagatctgtagtaatgttcctctttcatgtatgatattagtaatttgttcttttttttctcttggttagcctggcaaaaggcttatcacttttgttgagctcttcaaagaaccagtttttggtttcactgattttctctattaactttctatttttaatttcattgatttctactctaatttttagtgtctcttttttccaggttatttcagatttaatttactctttattctctagttttctaaagtagaagcttaggtagctgattttagatctttctttttttctaaaatatgcattaaaggctagaaagttccctaaaagcagttttgtcactgcttttatggcatcataaaaaaattgatgttttagtttaatttttatttactttaaaatacttttaaatatttattgagatttattcattgacgtagacttaacactgagttaggctggtgctagagtctgtgctcttaactgctattctatggcatttttaggcaagtcaggtccagtccacctgtaaccctacacatttcacatacatacaaacacactaataaatatgagaagtagaatctgaactgcagaaacgttgtgtattttatttttattatctgtatttttgccttatttcctcacttgaattcaacttctttcaccttgacacactggagagccagagatagaaagacccctcacatatgccagccattgagatcattaggatgatgaacaggacacaatttttatggagagttgtgtggtcaggaggagagttgcaagaaccaagaattatgtgctaggaaatgtgtgttaaagtagagatgtatacagagtgctgtagaaacatggagaaagattacttaactctgatctgggcaagggagagggggcaggaatatcagacaaattttacagagggtgttttgaaggaggaataggagtttgacatgtgagaaagtaggatacggatgtcagtaccctatgcaaaggcactaagacctgggcgaggttagcattctgagtcagtgaagagggtgcatttgaagcatgacgccagagagaagaacagggtggaaggtccagatttcatgcagagtcagcaaataggagtaccttaggtcttgacgtcataaacccaaggatcagacaattttccagtgtcaacaaaagccaccataactgatggaagttaacaagacagggtgcagagaggtatgtaaaggaactgagaagacaagacattggtacaagccagtctccagtttcctctattttcccttggcccaaagcactgtcactagaagatttcatgtgataataataaattttctgtgaaatagtagaagcattatggaggagagcagattctgtgcgaggtatccacctaagacatgcatagccacagcactttgttccctgaaactagagtgaataaataggatgcctccagaaaacaaaaatcatcttcaacaagatgccttttacctatttcttgtcccttttatataatttctggcatatgtgtctatatatagaaatttcctttaattaactaattgcacaaacacacatttgccaatgttttctttaataaacctatccttttctgtgattcaatgaaatacattcaattctgctaatttttcataatgctttccattatgatagcaaaataactcagttctgggaaaatataccaataactatcttgaattgtaacaacagtaaaaatgagaacattttacctgaacaacttgagttttgtgtttgtttgtttgtttgtttgttttcaggtagagtctctctgttgcccaagctggagtgcagtggtgcgatctcggttcactgcaacctccacctcccaggttcaggtgatgctcctgcctcagcctcccaagtagctgcgattacaggtgcatgccaccacaactggctagtttttgtatatttagtagagacagggtttcaccatattggccaagctgtccttgaactcttgacctcaagcaatctgcttgcctcggcctcccaaagtgctgagattacaggtgagagccactgcacctgaccaggagttttttaattgaaatatttgtgcacaaaagcccatgatgtcaccactagtggttaatttatttgtttgtctgactcataatgaatatgagagaattgttttagtaaagataaattgcttttaataaggactaaaatccctttagtttaacacaagccactttattagcagtgtttctgggaaataaaagcaagagttggttcttccagaagtttaatgccagatttcaccaccttcatgagaaatcagaagggtattgttaacatgctgtttcatttgaaacagttttaacttttggtggtcagctcaataaatggaattgattgcttttaacccgggacaatgacatactgtaccaggatatgccgctgtgtaactttcaattctactttttgtattggcaggacttggcaaagaattgcagtgcatgtttccatttcctatctttgactatatatttgttttgtcacttaatagagctacagagataacttgaggaacaaactgactacccaggtctccaggtcaattttctgttattttgcatgaaatgagaaagtcattttgaccctcagaagacaaatcagtgcagattatagatcttctcttgatccccaaaggaataccccaaattcacacatttaatgtaacatatctttattgaacacctaccatgtgctgtacactatactaaactccttagggatatatatacatatatctgagatacggcatcatggtagagagaaaggggcttgggccctagcatatctagccctcacagcttcttactaaataaaacttagcttatctgagcctcagatttctgttcaatggaaattataatacctacatgtacagctattgtggacactaaataacatgaatagcattgccacattgcagatgctcagtacctgttggtttctcattctctctacatcacaagtttagagtcacattggaatgacccacatccacactccaacaagaattcaaaggactctagagcaagtgccacacatatggcataattaactgtggtggttttaggaatcgttggcttgtgggtcactagtatgaagatagttgctgtttcttggagttgaggttgccaggcaaggcttcatgaagttggcaacacttgaattgggccttaagtgtttctggattccagatgtgtacagagaacatgagatgaaaatcctggttggataaaaagtgtgagcagcatcttgggagtaggactacacatgtcactttacaagagctgagagtagactaatttgagtagaggagataatttaggtgggtaaatgggagcagatataattttaagacacatgaagttgagtggacattaaaaatatgtttagtttgtggacattaaaatataatatagttggccctgttgtgtctgcaggttctgcatgtgtggattcaactaactgcagatggaaaatacagtatttgagggatatgggctctgcacatactgagggctgactttaagtagccattggctccacaagacctactgtgggacttcagcctctgtggattttggtatctgcaggaggtcctggaaccactctcccattgatattgagggacaattgtattgtaataaaagtcacaaaagatttttgagttgaggctagtatttttaagaaatctagtccagttttacaatgcagagtgaataaaaaaagtaaataaccagagttttaataatccagaccagcatgaattaggttgatggcaggagcaatgggagaaagaggtgtaggacttaaataaagaattgattggctttggttattgattgtatatggaagtgagaaagaaagaagaaactagtatgaatccaactattcaaggcttgttaactgggaaaatgaggaaggttgaaataatttttgaagataaagtgtgtgcttttagatgtgttcaatttaaagtaattacagggcatccaagtggaaagctctaaacactagttggcatgtgaggggagaaacttaagacacgtcaggaaatcaagatgtgagttatacatcctcatggtgttactaagcacctaaaagaagatgagttttctaaggcagtatttctcaactgtatcttgtattattaaacacccttattcaacaataagtacttactgagacactgatgcgtgtgccacatgccaagctcccatctgtgtaccagggatatggtgggaaacaccaacaaagtccctcccatcatggagcagtcagcacatgatagttgatgtgcatgaaaatgttcaggtccatttgttagctcttacaccgtgtctctcaagagagcctgtctacatggatgtgaagaacagtggcattgctatgaatatagttctaaatgtattctaattcattaagaaagtaaatcattcacaaatattgagaacattgtaaataatttgcctcgacaaccattgtatgtcaacaccttagatgagaagctctgctttaaggagaggttaggaagagagcaaaggggctcaaaactgaaccttggggaatagacatatgtaatggactggaaaagtagccagtaaataaatcaatggatggatggatggatggatggatggatgatgaatggatgatggatggatgggtggatgaatggcggatggatggatgaacaaacaaaacacaggtagacagacaggtaaatatatagattaaaagagagctaaaaattaaaacaaactcatggagatagacagtagaacgatggttaccagaggctggaaaggggaatagagggatgggagagaagttagaatgggtacaaaatatagaaagagtgaataaaatctagtagtatttgatagcacagcagggtgactatagtcaataataactgtacattttaaagtaactgaaacagtataattggactgcttgtaacacaaataataaatgtttgaggtgatagatacctcatttattctgatatgattattacgcattgcatgcctgtatcaaaatattacatataccccgtaaataaatacacctactatgtaaaaaagaaagtgagacagaagtaaagattagagaatttagaggactagaaagagtcaattgaggcagtgtcacagaagctgaggaaaggaaaaattaaggaagaggacacgtttcacagaatttaatgatatagataggtctacagagtgagagttgataagtaagaaggaagcacactgataaaactttgaaagagcagttcagcaaaatagagaagagtgaaggtaatattgatggggttatggaaaataacactcatagggaaaagaaagcacaaaatgattcaaagtctttattggcttatttataagcaaatgacaggttgaatatcagaaacagaaatgaagacattgatgaagatggataaggtgtagttgggagcatacagaatcccagaagttgaggcacatccagcagaaccacctcataataggtttgtcacaggaagtggatcttggggtcaagcagagtaggtcagttcctagtactgaagtttgaaacagatgttctgtcggggaggagagctatcaaccccagtattacatgggagagacttgagaagtttaaaaatccaaccaaagttgtttatggagttgttttttacaatcattttaatagctgggtgaagggtaaattgtatgtagctaaaattttaggcagagacactggtaagatgcaaatctaatgcaaatctaggccaaaatgataatttcgagctaggataatagctatatggatggagaggaatgataagattcttgggcttgatggggccttgtgacagtgaggaatgagagattaggtgaagggaagtctctgtcaataaatatttattgggtacttaagctacagattagtcacacagaaggagtggatttgtctgtgttgattggaagcaagatgaattacgttttgatgatgttgagtcagaagtgctttcaaaacaaacactaagttaaagatgccctttcacaattgtaaataatttggagctcacatgagagataggggttcaaatctggatttggaagtcattggtttataaattcagtttctacccagagagaacacattctgtgagaagagagccagactcaggccacatttaaagggtaaggaggcatagaagagacacatgaagatgcaaaaaatgagccagcagaaaatagtcgtctcttagaggccaagagacaggaagtgtagagcaaaagatacagaagtattagataagttaggagcacacattacccttgaagttaatcttagtaaggacattttcatcccagtagtgagaatggaagctaggctacaaagagatgaagaacaaatggaagtgaatattaaaaatgtttgtatagactcctttatgaaagaaaatcagaagtctgctaagcaacaaatatagaatgaaaacagtagaaagattacatgacagagatgatagaagggtaaggaatgacataagggaaatgcaaaaacattttggaggaagttaaatacaggcttggaaatgctaagtcatccactgttctaacctgctgccttcaaggactgatgtaaagttggcataataatggcattacatttcaagaacttaggatattgtctgacacatgggaaacattcagtttctctattagtcaagatatgcaaaccactgtaaacaaattcctaattttagtagctgatcatgacaaggtttatgtctacttcaggtcacattccaatgtagattgacatgggagctctgctgcacacaatcctttggggtctcaggcgctatgaccagctgtcagacaaggaaagaaagaaaatgtggaagaatatgtgggagggttctttgagacttggaatgctatctgtgatttctgtctttgtttcattggccaaaagtcagtcacatgcctccttctaacagcagggcaggctagaaaatgcagtctaactgtgagccctggaggaaaagaaacaagttttggtaaaaacaatggcagtctttgtaacagcctagtacgatttactgttattactatctatagcagggtcttagtcaaattaattccctgcagaatgaagatgagagagaagacagatacaccttgatggacgctggggatgggaaagttagactcataaacaaatggaagcctaggaagtgaggaagaaacactgccatcctgagaagaaccacaagcactgggaagagatagggcaacattaaaatcctaaagctatacttcttgtccagacttgccctgcatttctgacctgtacagtcaactgccactctatttgccatttggggttctatagataggtcaagcttagcatacctaaaacaactcatttcactccccaacaaaatttactttacatggagcctttttttttttaatgcaatgcatggtgacacctttcttccaggtagtcaaatcacaactcttactgtcactcttgagtcctctctgaccctcatatccagtaaccagttaatcagggaatcccgttagctcaaccttcaaattgtattcataatgtgatcactcggcaccatctccactgctcgcgtgctatcctctacaacacctgtgccatctctttcctcccagtctcctttcaacccagtagtgagagtggtccttcaaaacacaatggaaatgatgtctcatctctgctcagagctctccaatggatcacacctcactcaaaataaatgtggaagaactccttgcaatggtctacaaaactctcagttatcatatcttttttttttttttttttgaggtggagtctcgctctgtcaccaggctggagtgcagtggcgcaatctcggctcactgcagcctccacctctcaggttcaagtgatttccttgcctcagcctcccaagtagctgggactacaggcacacaccaccacacccggctaatttttttttttttttgtattttagtagaaacggggtttcaccatgttgaccaggatggtgtcaatcttctgacctcgtgatctgcccacctcagcctcccaaagtgctgggattacaggcatgagccactgcgcctggcccagttatcatatattacactgcttccgactgatattgcctcacctcacacgctggcctccttgtcattcctcacacatgtcagccatattcctgctctggggcctttgttctggctgtttttacagtatggaaccctctgtcctctgatatgcacgtggctactccctcacctccttcacatctttgttcagatgacacattttaagtggaatctttggatactttcccctgggcaccatatataagaaagcaacatctcccactccaatagctccttaatcccttagtctgctttacttcttcatttctcatagcatgttgcaccctcacacacaagatatcattttcctaattattatgtctaatgtttagtctgactcactcctccccactaaaatgttaaactccagaagatcaggggtctttgcatctagtagaggttcagtaaatactttgaacatagtagaggttcaataaatactagttaaatgaatgaatgagttaataataaacaaatacgttgattgattgattgactggttgattgattttgccttgagccctcatacttcttacattgcttggcaagtagcaatgttctacattttgtgaatgattgttatagtaatggtctgggccccacaatacagacggcagctgaataatttgacactttggtaaggaataaatttctcctttcattaatgactgatttattctattttctttatagtataaatattatctgtgtttcaaattgtgtctgaaaacttacaggccagcaaatggttgggagtggggagcatgcatcacttacagctacagtgattttctgtctctgactcatcttaaaaagccttaattgagtatttattcttatgctgtgagatccaagaaatcttaactgccattaagctgtctacagaagcaaaacaaaatggagaattaaggcaattatcagcatgatatgaaccatagaaaacatgtttccctcaatctggatgtttcgagagaacttatttttgatctaaattatctgagtaatttccccttcagttttcattttattttgcactgatagacaataatttagtatagaaagggacagcccataacatagggaatcagcgtgcgaagaaattcattatccagcatgtgtatgtctgtatcttctatttttactaaactttgttgccagaggagacatttaaaaaaactgctttctaaggaattgttgaaaattaactgatttactgaagttgtgctttgatacctgcctgccttttgacctcaactaaaataactcttcagtttgaatttcttttagctccccttttgggctgtaactttagatccagctttcaaaagccaacaggtaaataaacaggatattaatcatcatacattcatttcaatgagaatgcagccacaatcagcataagcgtgggctatttctgaattacatgaaagccagctccctagggtatgtccaatataactgtgataatgaggaatttgcaggtggacctgctgttcttgtgtaccttattaagtgccttgtcaggtcaattgtatttgtctgatatcttcaatctctttcccctgagatattttccagtaagactatttattaactttaacatttcatattcaaagtagccctcaccccggcctcaaccaccaccaagttctatcacatgaagtaatgacaaagaagaacctgggtaagttgctgcaaggctgggctggctgagttattaggcctctgtagctaaccaggcctgcatcttcctgatatatgaacatttcagcgggcaaagaatagaatccccacgaggatctcagataacatcagccttacccatgtgtaccccaattactcacctcaaatgctatccctcatctatcacttggctatagattcatcagaagaattgaaaatcaaacagaaatattgtacaactttttcaggaagtgatacaagtagacatggaggttacagctagtttgacgcagcctaggaaaaaagggtactggaatgcaaaaatattccccatgtctatgtctctagcagtcaagacctcaatttttcatttttgcttttaaaatcccacttgacttcatcctaacctacctaccatcctaacccatattctctgtcactcctctccattgtgacctttctgcccaaattgactaatctgttttttgatccctgaaaaatctctgggctttcctccctccaggcctctacacatatcttttcctttgcctggagtgcccctcgctgcacttgtgtttgagccaatctaatccacacttcacagtctagctcagaaaccttctcaataaagttctctcgtttagcacagagtaattgcttccatctctgaatccactcagcacaactcactcttctttctctttctcattctttctagatttttaattcttttgattatagaatatcaacttatacaaaaaaataggcataagcttaaatttatagtttgctaggtggttcaaaaaggaatgcctgtgtaactaccccaggagaaaaactagactgttgccagcacacaagaagcaccccagcgtcctggccaattgacaacccccttcttttccaccagagctaacctctgcccttcatagttcatagttttcctatatgtgtgcatccctgaacaatacagtttagttgtatctctttttttcttttaaaaacaattatgtttattcaaaaaaggctagatgaaattaaatcaggctattttaattgattcataatgcaattttaaagattaaaaccaaatattgaaagactaaaatagccaagaaatgctgaattgattagtaaataatatgattagttcaaaatgctcttatattaataacataaaatcattttttctgctgacattgattatagctaagttgacattgtgagagttaaatgcagtttattgaaacctgaaatagttaagttgcctagtctagtaatggagttaaggtcactttatttgaaggtactaagcttactgcataagtaaagctggcagagttatacttgctgtacttgcagttaccaaatttaaatgccttccctggtgaaagagtgttggttaaatgagccctgtcaaatttttgattctggctgcctccattgaagttgaccaagcttgtgggtggtgatgccccaggcttccttgtagctgaagaaaactgaagaaatgaggatactacattataagtagaagagaatacagttgcaaagagacagaaaccaagtatacacacacacacacacacacacacacacacacacacacacacactacacacaaggtgtttttaggtgccgtttcagaagcattgtgtctgtgtatgtgtgaatccttggtttgtgtctctttgcaactttttttaaaattttttatttatttttattatactttaagttctagggtacatgtgcacagcgtgcaggtttcttacatatgtataaatgtgagttgtatctctttttgaagtgtacatttttttatgttctacaaaaaaagataaaaactaaatactaaccactctaaagcacatcaatacattatgtatttggggactttccccagtcaatattacttataacgtttaagtttatggtggtagctacagtccatttatttttattgttgtataattttccactgtgtacatatactacagtttattcattgtatggttgggagatagttagattgctttaatgtttagcaaatataaatattcttgctgtgaatattctttgacatacatttctttccacatcatcacacatttatatcggacacatacacagaactggaattgttaggtcataggtaagcattacctacttttatcagacttctacattttggcaacctggtggtcctgtatcttactgcatttatctaattactctgaagccaagcatttttctggatgactttaggcatctggatttcattcgactgaagtgctttttcaagcacttttctttaggatggtcaaccttcttttctcattgtgagaaaaattgtgaggcaagaattctctctatagcctggatactatttcagtcaatttcgtgtttgtaaaagtcttcagtgattcctatggcttgtcttttccatttcttctggatgtttttgaagaaaagctcttcgttttgaatttattaatcttttttatgtttaacacttaaaagtattttcctatataaggaaatggcaatattcccctatattgtcgtctaattattttaggtatttaatccacttagtatccacatcatagtacagtacaggtagtggtatattttattttgtacatagctattccgttttttccagcataatatattgaaaagactgacctttccccatcagcttctgtgctctttctgctgtatattaaagacctatatatgtgttagtttctgtccacttgtatgtttgtctacatctgtgtaatttctggtgtgctgattatttaaaatatatcttaatatttggcagagcaagtcttaccttttagtttttgtttttttgaaagccttttgactattcttggcctatgttattgccacataagtcttagaattagtttgtctgcttcacaaacaatcttgcctgggttttgattaggattgccttaactgtatataaatttgatgagaattttataaaaatattgggctttataattcacgaacaatgtatataattcatttaagttatttttagtgtctctcaatagagctttataattttttttgtaaaaaccttgcatatcttttgtgagaattatttccaggtgatagattatttttgatactactgtaaataatgtattttaatctaattttctaaatatctgttatttttatgtattgattttgtacaagttttgtatgcatagccttggtaaactttcttatcaatttgataagtttttctgtacattattttggaagttatatgaatataatcatactatctttgaaaaatgacaatttgattctccagttccaattctattaccatttagttttacttgccttattgcacttatttccagtgaaacagtaaagactgagtttggcatggttgtttggtttccagtaaaaaaaaaaaaaaaaaaaagaaacggtgaaactttcatcattttataattttcaaaattagggatgatatttgctctgtaagcttagtagaaaacatttatttcaggctaggttccttctcttcatagtctgctgagggtttctgacatcgtttgctgaattgtattaaatacattttctggatctattgaggttgtgtttttttctcctaatgtgctaatgaacttgtgaagagctgagccagactgagagctgagctgccaggggttcgagtggccatgaagaaaataagccaaaatgaaagtaacagtcaagattttcgtcaatagtgcaatactataagcaagatgctcaactggggaaagcactgacttccctagtgttccattgttcatttggaatggcaccatccatggtcagatagatcagcatagacatgatgaatctccttattgctaagaaagttctaaacaaaaagctccttctgttttatggaccataaacaggagaatgggaaggttagtaatggaaggtattgagtactgagtcagagtgaaaaaagagtatcctcaaagttcctccctctaccataataaggaggtctcagcacctgagaaaaatgtcttctgaagacccccaaataggaggcctctgaatgtaggtaccaggactaagaatgcagacatgagtaagaacatggccagctgatggcacctgagtccctgactgcaatactcttcaaagactgcagtgcattggctgtgcaccaaagtaggtgtggggaaggtggttttccctgctgaggcctctcaggtaaacgtttggtaatcacctatggtcaggcttgaaggatcacacataggttttcaggcagtatcgagagtccttagtgatgaatgaagatgactgtgtttaatgccaaactaaatttgaattcctggatgaacccagtagtaacatgatacaattgatgtttttaaatagtattgttatgtttattttaatgtgtcagtaatattttgtttagggctcttgtattattgcttgttgatggaaaatcaatggacttttgtatattaaatttgtatcccgcatctttgctacaattgcttattatttccagaatttttttttgtcaattctcagattttccacggagatgatcatagcatgtatgagcaaagacagctttatttcttcctttccaatttgtatacccttatttccttttcttgtcttattacattaactagtacttctagtacagtgttgaaaaagagtggtgagaggggccatctttgccttcttgacattagcagaaaagctttgagtagataatacaattttgtttcttttttctagttttctttttaaattctgctatcctgttttatagggttttgtcctctgcagatatttttaagtttttcatttattcttataaacagggtaagcatagctcttttaaaatgtgttctacaaatcccagtgtctgaagtgtgtgcagatctctttctgctgtctgccatgctagttctggccatgttatttcctttcttaatgcatctgcttatatatgactgcttcttggccattgcccttaaaaataacttgggaagattccttgaggtctaaaatatacctcctacaaagaatggggcactgtcagtctgggactacttcagtcaaatttggtgacttaaattccatcaccagtccaggctctgagttcaaatacatgaaagagccaatcaatgtccacaatcgctcaagaaattttcctctttccttccttccttccttcctcccttccttctttcctttctttctttctttctctttatttttttttctgtcctgcccactcatcaccacagaaaacttctctattatcccctcggatttggggcttgtggtggaatataggttataattagttcagccttctttcaaaatgtagcgttctgaagcttcaaaaggaagtgtttcttataagactcccaccttgggtaggccatggacattgacttctgttcctctcaccacctatagctctgaattgaaacccatgtgtgcagtattgaccagtgacttcaggacataagtatctttgttaccttaatattccacttgtgtctagttacaggcttccactcaagtgtattccaacattgttcatattttattaagaagtctgatctgaataaatttgcccaccattattctaaatcaagacccaggagaaattttctctaatgatattttgacaaacacgtatatactgtgtggggaggtggagggctatagtaagaagagcaggctttaatcttcgttccaccatttgccagccatgtaactttggacaagtcagtgaagacattcaaaccttggtttactcatctataatataaggaatatagaattagtgacaataaatacaaagcatagctttgtatacaaattatgtatacaaatacatagctcttaccattattattttcatgtctccatgacatttttatatgttcttgacttgaactttaattaacttttggattaataatttgtctgttttaacatcttgctttcttaaggacaatggaatatcttaaattgttttttataatcctctgtattagctagcatagagtaagtacttattaattttttcagtttgttcaatacatccagacacttgctggtctgttatgaaagagtatgaaactttttgagtgattatgtgcaaggattctcaatcacttgccatcacaatagccattttcactttctttatagcacttgtcactatttgaaattatatttctctattatatatttacttgtttgttccaaatagaatattaattttcctccctaaaatttcggatctatcacaaagtgggtgtttaatggatatgtattgaattaaaaaaagaataaattttacaggaatcaaggagtgggagctttttgtgacattgacttttcattggtatttgtcatctttctcagctcctatacttctggaaaatatttattcttaatttggctaattgttttatttattgagaatataaactttccctgaaggctaaagtttggcccaaagagtgaggaaaatcagctgttacctgtgacatgggttaaaaatcttcttacaaaatgagaagtgattacacatgtagggctttttcattacattaaaacaataacagtcctgggaatactgactatcgaaaggcagaagaaggagactagacacctatctctcgctacatacaaaaatcagctcaaatgattaaaggcttaaataagaggctcaaaactatgaaactaccagaagaagacacacaggaaatgctttaagacattggcctgggcaaggacttttaaaataagacctcaaaagcacaggcaacagaaacaaaagtagacaaataagactacattaaactaaaaacctttttcacagcaaaggaaaaacagagtaaagagacaacctacagaatgggaaataagatttgtaaactatacatctgacaaggagctgataccaagaatatgtaaggaacttaaacaattcaagagcaaaacaacaaatagtccaattaaaagtgggcaaaagacgttaatagacattccttaaaagaaggcattcaaatagccaataggtacatgaaaaagtgctcagcatctctaatcatcaggaaaacacaaatctaaaccaccatcagataccacctcactccagtgagaatggctataattaaaaatactttttaaaacccacaagtgttggctaaaatgtagagaaaagggaacacttacacactgttggtgggcttgtcctcgagaaaacgtagttttcataattttaatttgacaaaatttttaaaatcctggaaatagtaaatatgttacccttcaataaacaacaactgattaatagcttgggtaagagttcagtacatacttctagctacacaggaggttcctcaaaaaaaaaaatatagaaatacaatataatccagcaatcccattacttgtatactgtatattcaaaggaaatgaaatcagtatgttgaagaaatatctacattcccatgtttattgcagccctgttcacaacagccaagatatagaatcaacccaaatatctaaaaatggatgaatggataaagaaaatgtggtatatctattaatcaacaatgaaaaactatttggctattagaaaaaatgaaatcctgtcatttgggacaacatggatggatctggaggacagaacaaatacctcatctgtggaatctaaaaaaaacaaaaaacgacaacaacagaaaatattttaagaggtgtttttttgtttgtttgttttttgtttgtttgttttatcacagaagcagagagtagaacagtggttaccagagatgggaggagttggggagaagagaatgggagagattggtcaatgcatacaaaattgcaattaaaatagatgaataagatctgggattctattgcacagataaacaataagatatgatatattacaaaatagcaagaagataagcttttgaatgtcctcaacaaaaagcaatgatgaatacgtgaggtgatggtcacactgaatgtctggatttgatcatttataccacatgtatatgtatcaaagtgttaaaatttaccccaaagttatgtataattatgatgtatcaatttgaaaacaaaataaaaaattaaaacaataacatgattcaggtactaatgtttacccacagtaaaagtaacattttattactttatcataacatgtatattgatatttgaaagagaagaaaataataacactatgtagctagaagtatgcactgaactaactctttcccaagctattaatcagttgttcattgaagggtaacatatttactatttccagggttttgaaatttttgttaaattaaatctatgaaagctatgttttcttgtggacaaagacaagagatgcttcccttttatcctcttctaagaatgccctaatattgtctctaggatttaccactttggcacgttagttatattgtttgagcataaattgctaagatgtaacagaaaactgtagctttgaaggtcctacataaggcccacaatatactatggaagcctcttcttggttcagaaattctctcctgaccagaagatccaggaatgatataatgagaaagtgtcataaaagtgggggaagagtgacacaaaaaccagctgcaacccatcctatctaggttgcagctggtttttgtgttagatgcgtatgtcagaggttttttttttcagtcagtgtacatcaaatgtgctgtgaataaaagaatgaggtacatggcttccatttctattactctccactctgtaatagaaaagctgaaattatatcaaggttccataaattcccacagttctagaactcggactgacatctttaacttggagtataattatttagttcaggctttgtcacctagttgattataaatacttaatgcgtacagagatgtttaatatttgcattagagtctttagtttgcaaagatcttcacaaatatctaatcttcagagcagctcttccctagttaatctgaactcaaagctgcttaggttataggtattttagtattttcaacccagggaaaatataccagtttccttttaggaaccctttaaactacctaactgcaacctttattattattattattattattttgcaggggagaaatagttgggaagaaaaggttagtctatagtgttattcccataatcaattagagataaatcaaaacccctgctcctgtcaagacaaatatgtttctctttagttgtgatttctcttgtgtcagtggcaggaaaagaatcatacaaaccacatacacatgaatttctgttccagtatgagcagtccaattacagaacctgcccactctttgtaccagtttctctatcaaaggtcctgactttgaaggttggtgattcgctcactatgcaagattatctttttcattgcatggtttcttctttagtgaaaaatctctgtttctgagcaaatgtcatttcttgtattaaactttatagctacccctctgtgatgtgatattccatttcgctggaatcacttgtatatttttttattatgtcctctcccaggaagctcatctaaatcacagtacctcaccaagatttgtttctctcataattgttcctacttaattactgtgtgcacattggacccttccaatgtgctgagccggtcttagagatgagaggatgaactatgaaaataagatttagcatatgaagagaataaggctgaattagaatgggagagggaatgtgtttgtatatgtgtgtatatttatatatgtatgtatatgtatagattatacacatacatatatactttgtaaatgagaaatttatactcttttgcaaagcaaatgcagttgaccatgtgtagatcttaaggcaattttttctgggacgacagcatatatggtattatattaattttttaaatatattttcaacttcttattttagattcaggaggtacacgtgcagatttgttaaatgggcacattgcatgatgctgacgtctgggatacaattgatcctgtcatccaaatagtgagcatcacacctaacaggaagctccgcttccttccccacccccagtagtccccagtgtctactgttgtcatctttatgtccatgagtacccaatatttagctctcacatgtaagtgagaacatggagtattaggttttctattcctgtgttaattcacttagtataatggcctccagctgcatccatgttgctgcaaagtacaagatttcattctttttatggctgggtaatattccatggtgtatatgtaccacattttctttatccaatccactgttgatgggcatctatgttgattccatgactttgctattgtgaatagtgctgcaatgaacatacaagtacttatgtctttgtggtagaatgatttactttcttttggatacataccaagtaataggattgctggattaaatggtaattctgtttcaagttctttgagaaatctccaacctgctttccacaatggctgaactaatttaccgttccacaagcactgtataaacatccccttttctctgcagcctcaccagcatctgttgttttttgactttttagtagcagttgttctgactggtgtgagatggtagctcatcgtgcttttgatttgcatggctcacatttttaaaggaatttgtaataaataaacacttgcaagtacctaacaacttgaatttaaaatatatgaagtaaaaatggtcagaattgtagggaaaagttgacaaatctataatcatcacaagatattttagcacatctctccgaaaatctgatagatcaagcttataaaaaaatgtaaaaagagagaagatatgaatgactcatgtaatagttacttaacatacataatgaatggtataaatcaaattactgcatctatcttagtgctacaggcataacttgtaatagatatttaaatgtaaagtattacttattgaaaagtgaaatagcaaagatgttttctctacatgactcccaactaaagtttgtttctttgtgtttttatctttccttttacatgtagccaaaaatcacggtttctttaggaaaaaaataaatcagcaaaattggttcattaacattcataaagagcttagtctaggccaagcgcggtggctcacgcccgtaatctcagcactttaggaggccaaggtgggcagatcacctgaggtcaggagttcaagaccagcctggccaacatggtgaaaccccacctctactaaaaatacaaaaattagctgggtgtggtgacccatgctactcgggaggctgaggtaggagaatcatctgagcctgggaggcagaggttgcagtgatctgagatttctgtcgcccaggtttgagccactgcactcaagcctgggcaatagagcaagactctgtctctaaaaaagaaaaaaaaaaagagcctagtctaacttggttagaaagaatctattcaatcttttttttttttttttttaagtgccatctaaacagaacccatctcagtggcatgttgttgccctggccattatgtataccctaaagaattatatttcaaatgttaatctatgttagaatcacctggagggattcttcaaacaagattgttgggcccaagatggggcccaggagtttgctgggtttttttttttgcaatggaatctagctctgcctcccaggctggagtccagtggtgtaatcttggctcactgcaacctctgcctcccaggtttaagcgattctcctaccttagcctcctgggtagttgggattacaggtgtgtaccaccacagccagctaatttttgtatttttcatagagatgaggtttcgccatgttggccgggctggtcttgaactcctaacctcaggtgatccacctgcatcggcctcccaaagtgctgaaattacaggcatgagccaccgcacacagccaggaatttgcatttctaagaagttaccaggagacagtgatgtttctgggttgggagccatgctttgggaattgttctagagcacatgagcataaggctgctaagtcatcagaattccccatggtgcatttcagatgtgggttgccatgagtcctgagtgtgtagaacaaagcagtgctttaaactagaacaacctcaaatgtaagaagaagtttaaatatgtaatccaacattggagagaacagtcataatgtgaactgtaaagagaagcttgttgggtagcttccaaaaatgagtagattttacatttcagattatgttacatttccttcatcactaaagcccatatgcacgtgcactggaatatactctaccctctgattcctctacaaagggctcaaaaacctcccaggcaaagctagttctttctccatgcttgtctcattcatgaataacatcaaacaatattgtacaatgacttttgccatatgtttctctattaaactggaagacccttgaagggagagagatttgattttgattatcatgtacccaacattgtgcctgaaaacatgtgcactcaataaatgctgtggcatgaaagcccttcaagagcaaaggtattaaattgtccatcatcagtcaacatgtcttcctggcactgggtggagtgcctcatactgaattaatatttattggattaaactgaaaggaaacagcaggaaacaaactctaacctcttcctgtattaggtaccaggaaaaaataaatccccaaagcaggtatgatcttgtttcctgttgagccactccaaatgggcagataaaaccatctgctcttggtccaatgtagaatagatggtacctcaggttgcagggagccatcctggttatgccacctctgtccccttgccacattgtccacacaccatccctgctcttggtccatgcattttgtgttgctgttccttggtaacctctgccactgcctatgacagcccgccactggtactatgttatgcaaattgccagcctcaatacaaaccctgtctatgaagaggcacttggttggcagagtgaaaacacagagtaacgagatgccatctgcatttcctactacatagctcaattagttgattgatttgtaacactttaaaaaacattttctaggcaaagcacattaggagagtgttttataatgtattcagtttaattaaaactgcactaagtggagtactttgcttcttggtttgagaaaaaaaaaaatttacaaggaggtcacatatcatattgatttttaaccccctaagcaggagtaaaataacattgttaaaggttgcagcatctagagccacacaagtgtacctctttaaaaggtttgctgtaattagaatagagaagattggttagtaagagaaaacatgaggatgccgtcataaaatgggggtgggtaggtaaaggagggaagctggtaacatgctctgaatttgaataaccaacaacacctgctcctttttgcacacaaaaatgcttttatcatctgaagggggaaggaaaaacctgcaaccattccagatgaattcaaggcttaaaaacaagttagaaatgtttaatgtctatgcaagtctttactattaaggtgagtgcattaaaaaccttttggtaggacagttttccaagtttggataattttagatgttaatctggctcctccctttcacatctcagatcgttgttaccaggctgctttctcctcattcccactgcctgtcacattaccaaatgcaagcaggcttccgaattgttagtcagctgattaaaccctcaaattattggagacatttgcatgggtaattatgatttatttaaaagcactttgtttgcattgctcttgtctcagtttcttcaaagccaattactgaaaaattgattggattggtttgatttttgaaatcatttggaacttcagaacacatccctttgcataatttttttgaaagtaaaaccaaaacaaaacaaaatggaaggagttctctttgaaaatctgtatgcttcatgtctttggaacttctgtagtatgcaaataagtggttaaaattagtagtagaaacagtaatagttatttttcaatagaaggagagatcagagtaaatcagttaaattcactgtttcagctccatctcattttgcaaagttacctgtacttagtagggcaatttttttttttctaattctgttggacttctaagaactagaaggattattagccaggatgctggcaataatactgccctatatcaaaggagattatttttctgatgaatatgttgatacttcattatttaaatcctcttttggaagaatccaaaactgaccaatctaatactgaattctaccatctactgtagaaaatacctccatgagtgtcttagtttaagctactataataaaatacaatagactgggtgatctaaacaacagacatttatttctcatacttctagaggctgggaagtccaagagcagattcggttcctggtgaggaccctctttctcattttcttctcactgtgtcttcaaatagataagagatagagaagagagagagagaaagaactcttacctctcttcctcttcttataaggacacaaatcccatcatgggggccccatgctcaagacttcatctaactttaactaccttgcaaatatcccacatccaaataccatcacattggagttagaacttcaacataagaattttgggaggacacaatcatttagcctatgataatgaggttctgactttgtatctactccttcccaaaccatgcccacaaaaagtctcaaaatattgcctttggcttatccattcactttttataagcgattccaaaacagaagatacaattaccattggtttcttaggatagacagttgctttaaaaatattgtaagcaaataattgttgggtatttattacttaaaagttaataatttatgtataaattaccaacagctcatttctatatgataagggtgtctcagaaagacattttggaataatacattcctgtaattctttttttttttttttttttgaggtggagtcttgctttgttgcccaggctggagtgtagtggcgggatcttggctcactgcaacctccgccttctgggttccagccattctcctgcctcagcctcctgagtagttgggattacaggtgcccaccaccacacccagctaatttttgttttttttagtagacacggggtttcaccatgttggccaagctggacttgacctcctgaccccaagtgatccgactgcctcagcctcccaaagtgctgggattacaggcgtgagtcactgcacccagtcttttttttttttttttaagaaactgggtcttgctctgtgcctcaggctgaagtgcagtggcacaatcatagctcactgcagcctcaaactccttggctcaagcgatccttcttcctcagcctcctgagtagctgggactataggcatgctccaccacacccagctagttttttagtatttttttgtagggatggtgtctcaccatcttgcccaggatggtcttgaatgcctggccttaagtgatcctcctgtctcggcctcccaaagtgctgggattagaggcatgaggcactgttcctggcctaattcggtttattaaaggaccccaggccgggcacggtggctcatgcctataatccctgcactttgggaggccaaggcaggtgcctcacaaggtcaggagttcaagaccagcctggccaaggtggtaaaacctcgtctctactaaaaatacaaaaattagccgggcttgctggcaggggcctataatcccagctactcaggagactgaggcaaagaattgcttgaacctggaggtggaagttgtagtgagccaagattgcgccactgtactccagcctgggtgacagagcaagactccatctcaaaaaaaaaaaaaaaaaaaaacagaaatggaccccatagtcattctatccttccaaagacaaagatgttcaaagatgcctctgtgggaacccgttaattccataaggagcgttttcactaagaatataatgaatccatgccaaaaaagaaaaaagacaatatagtacttatgattttatatattactaatggaactggaagtaaaaataattactatttaattacagaaatgtgtactccaatgcacaaatgcctgatagaggataatgacgttggacaccaaaaacgttctgtggctgctggggacatttggcaataatttacatgtttaattgagttgctgtgaaaggctcattgtgcaattacatgttcacttaggtgctcagatagatactggaaatgcctaggtttcacttgtacctatttcccaaattgcgcctgcaacaaatgtgtccatttgcttatgtgggactctacatgtgattgcactctaccgggagtttaaagtgccttctgcccttaggtttgatggctcagtcttgctttgagcactattgcgacgtagactatttatgggacaatattgccctctggcagtgaggcagccagtggttttaataactgttttatgtcattttgacagtttttaaactagtcacacccagcagtttaggccagaagggaaacatcagtgaatgcctacaggagttttctattacagaactcgtacatgcatttgtaccaggaaaatgctacaattcttgctttaaagcaaagctgcctttcccaagaggagaactgaatttttgccgcgtaaagcttcagaaaagtgcaaataataatgacaatattgtgctcacaggacaaacagagaatagaaccattctccctttgagaaattcatgactggagtgccacaaagatcaaccccacgtgagccaatcacaaaacatcttcctgtaatgcatgttcagacactcgtgggatcaaaaaaggacctcagggtcatatctgatcctttggattgaatcatcgtgaggagtgtctcggcttcacgaaaatgacccagagctgctcgctgaagctggagaaaccaaaggcttgacagcagctgccaattcctggaggggtatctcagctgcttctcagccacttacgcaaagggaatgcctcaagagagccaggtgggctttaccagatggggctgaaattacagggagtagaggctctgctatgttgagaagtgcagcttcggcagacagctgagaaagacacagctcagtaggcacctgcctttccagcccagtggctgctgcaggaaacatttctgggatcacagaaggcaactctggatctcatcttggtcattgggacaggaaaaccaggcactgcacggcaaccccacgcattccttccttgcttcccactgcggaataggtcatgcatctctgggggcagagtgcagggagagagggcaggaggactccccaggagagggaggagaagataaaagtagcaatttatgcttttacttcaagcatgcacacaccgacatctagcaaaatgcctggaagtaccctgcacactgtttttcagctcatatttcctgagtgaccttatgtgaatggacacagacactgtggttcaaaagggaccaaattcgcaattctatttcaataaaacaaaaattagggattttgaagttaagatgagatatgaagaaagccaaaaaggaatattaccacagaaggagaaaaaacaaaaaggctagattcagaaaactgagtttaaatgaaacctagaaaggaatttcagactctgcatatattgaaactatcaagagtccataacatgaatgaaatatactgcgtacagtcatttagataaaagtgttttttgtttcgttttattttgttttgagacggagtctcactctactgtccaggctggagtgcagtggtgtgatcttggctcactgcaacctctgcctccctggttcaagtgatgctcctgcctcagcctcccaagtagctgggatcacaggcacgcaccaccaggtccagctaatttttatatttttagtagagatggggttttaccatgttggccaggctggtctcaaactcctgacctcaggtcatctgcctgccttggcctcccaaagtgctgggattataggcctgaacctctgtgcccggccaaaagttttgaatttttaaaacttatcctgtttaaaaataagctaaattattatcactcaaatacaacctcagtgcaaaagggaagaatttagcttagtaaataattaaggcaattgttttaattgtgcaagagataacaaaaatcgcttcaatgatctgatcaattgagggggagaaaaaggctattaaagcctattttaaccatcaagagtatgtgttacacgtatatccacattttgttataggcaaaattcaagaacattaagcatgtcactgaacatgaaactaagacatgaggagacagggttggggctatggtgtggtgactcagattttacagaagatccaatccagaaaagctagagcgcttttccccaaaatatgtaccagtctcggccaaccgctcaatcactaagccttgcaaataacctattttccaaatgatttcaaaagaaaataatgcctgccaaagcaaagcaactcattttccccagtaatgactgcaggaagacctttgatttccttctcagcttctaaagctttctttaaatttccctatttacacacagtgtttcacctcacagattctcctttcaacagctgtgtgggacaggaatgatgcccaaggacatgcagcccataggttttattttgttttctttgggtaattttttgggcagaggtgatatgatttctatctgaagcatttaaggaagaaattgagtatgccaattttgacagatgatagaataaaagccccagctatttctaggtttgaataataataataatggaaataatggcaataacaataacaatgataacaagtgccataacttcttaggagaatactacagactactgttcatacattttttcagtaatcacagaaatcctgtgaggcgaatgttactgttttcatcttactcacgtggaaagtaaggacaaggcaggtgacattgattactccagggccagagctagtaagcatttgaactcaggtctgtctgccctcaattccatgtttttagaccttgtgctactgttatttcttcagattaaaagatgcataggtgggctctggtagacaaattactaaccattctacctaaacctccctgttcctacaccctttgccatgtgaccttggagctcctcccactaaaggagcaggtctgtttccccaaccactttgagcatgagtttgaccatgtgacttgctttgaccaatagaaagaagcagagttaacagcctccttgtggctcttagtccaggctttcattggccttggtgcagctgctcatcctcttgcaccctgttatggctatgagaagaatattcctggccagtctgctagtcccaggagaggggtgagggacatgtaagataaaactgttctggtgacttgctaataaccaaagaccatccagatattcatgagcactactaaacgatcattgctatctgagttttgtcattgcttgttacaattactgtaccatctataaggtctatttgaaagaatatgtgcccaatgagtgagtgtacgggcacatgcacaacatatacacataccaaatggagtggaagtcttggtgtcttacatccagataaccatttggtgagaataaattcattaacaacaacggtaagggaatttcagtattttggttttcctttagaaagctgtaaccattctatttgctgctcagttctcttgttaaaagccaagaggatgttttcagacagtgtagctgcttagctctggttttggtctttgatgaattttacctgataactgatacttaaagggaccctctgcgcaccgccactgacatatctcagtaagagggagacatcttgacccctgaagggcagtgacagttcagtgctcctctgtcgagcccatcctgattgcgctcagtggcagaaccacccgagatggttttgactttgaacaacatcagcagtgagttgaattgggaagtaactttacaacatcaaagcctgccatcaagtggtatcatatcattttatgatgtaagacaccagacaaaggttgaatgaaggaaaaagaagtgtggtgtgcaagtatatattcaccacacacacacatacacacaaacatcacaggcatttgaaggtgttctcagattgtgactaggtgaaagtgttctttataactttggcttttgatatatttacctatctggcactagcaatgaatatttgatacagtcatagctacatgcttagactatgactaagtataatagaagaagtggagaactggcctaatatggacagaaatcagatccaaataatcttgccttaaaaaaaaaacacagatttttgtctcaatgttctatttaacatgctttctgctaactcaactgagaaaattgaatttgggtcaattgttacaaatacagaccaatgcattcaaaggctgtgtagtttcatggctaattgattctgtttaggtaatatttgcaagaaaattacttttataatgcatgaataaaaagatacatgttatgatagttggaaatctgtgaaacataccctaattttctaatatcaaagtaagacataaatatactttgatttgagctagatttttagcaagatttgcataatttcaataacatattaaagagttacatttgtaagtgggagggttgcagggtttagaaccaaactggaagaaaggctggaagtggccagccagttgaaacaaagccctgccattccatagaagagaagtgtatgatgaagagaaagctggctgtgctgtgcaccattatctgccacttttgccttgttaaacttgccactcaatttgatatgacctagtgtttatgttctattttgaagttcttctatgtcttctattttatattatttttttctgttatattgatctgattaagatgaacactgtcacatatcattagcaagttctgattacttgaccattagaaagaatatttatttgttctgttcatccatttaataccaccttgaaattcatagttttctacagggatgtctaataggcatcttaaaattaactgtctaaaaggaactcttgactccttcccttccaccaaacctgttttgcccagcctttcccgccatcataaatggcctcaccattcacccatttactcagacccaagcctagggattgttcttgatttctctccttcccttgcactccacctccaatccatgtgccagccacctaccagttttattattaaaatacgtcttcttccgatgccaccaccatagttcaaaacatcattgcctttcatctaagctgctataaaagcttcctgatgggttttcctgatttgactctttccccttatattggattctcaggcagcatccagggtgagtttttaaacacaaaatcagatcacagcaatttcttgctcagaactctccagtggtttccaagcaccctctgaataaagtctaaatttctcatctcagcctacgatgacctttatgatttagtccctgctaatctcttggttttctccttctgctctctgctcactctacccatgctggccttcctgctattctccaaatgtcccatgcttgtgtccacctcgagccttttcacttgctgttccctctgcttggaaaaccacacacaacccccggtctttgctgccttgctctctcacttcttctagtgacatttcttctcaaatggcacttcctcaaagaggtcttgtctagctaccctatcagacatagccctccatgctctataggctcttaccccttggccttcattgcagtgcaacctgctatccattgacagctgggttttcctctcgaagaaaggaattctggatgcaattgctagcttttccttattattatttttaatgcaaacaaaacggcctctgctgccagttcaaatactgagctcagagctctgttctttcctgctgaaatttataattctactcccattcttctggttctccttgccttataaacaacaaacatgtgaaccaatgtgacttctatattatactgatgattcccctatttaccaataaagtgtgatctaattttcataacagaaacattcattattgaacggtgtattgttcaggtttgtaaatgtgtagaaaatggcacaagcaaactgaaatgatacatgcaaatctattacggtgggaaagaatatttttatttttcaatctataaatactatgattatccttcatatactgtttgcatatatttatgtgttttttgtgttaaagagggaaaacataaaaagttaatgagatcctgaagtgaaataaagtgaacatatttacaacagcaacaagaaaggaatatgtcaagatagacatatcacagagatatatacacatgtgtgtagataagattggtgagatagacagataatagagcttgtacttggcctgccttcacccaatgttgcaatgacaatctatacaatgtaagtatttgtactttttatactttcaagaaaagcagatataaaattaatgcatatactttttgtttttggcatcctttcatggaagcaataaaatattctggagagagagagaaagagagagataaactaactcagggatgtgagaagaagaaaataaatatcactcttactcctccatctgaagatgatgatggaaataattgtcatatttctcttatgttttttatttgttttttctcccagccaagtatgctttttagtgtgggtctctgtgtgttccctttggtaatgtctaataacatttctaacctggagatttatttcttagaagcaaagttctgctcatcacaagccatctccatcagagccatttctccttatggtttccttctcatcatttaatgcttagtacttcttcacaatagaagcaagctgcctttctaagggatgaactgatattctagctagaggacttaatattccttttcagaaattgagaggttctctttgcttttctaggccttaattaagtgattggttatttcataaacagtcagattacatttaccactcacaattgtcaaatttttaaaactcaagtaaactttttttccttcttcaaacaagtctcttattctctcctgaagttaatggcgggcattactaccagtttcttggccagctgctaaggagattcctttcccttaaaaagttaaagtatttaagaatcaccctcaaaccccaggaagggtggtcaacaaaaaaagatgtcttcatggtcaaactttatggacacaacaagaatcccaaagaagggagatgactcaagccatcttttattacttagacgatcgatggcgatgatgtggaatttgcaacaattcttttcttgagacccagtaatagttaccttttgctacataacaaaccgcctcatagtataatggcttaaaaacagacatctattatatctcaggactcttagcttggagttctctccatgcggggtctctatcctcaactggctggcccaggcttgttttcatggtggcagaagggatccacctagccagagggcgagcccccttgcacaacacttttcatgtctctgatcgtgtaagatttgctatcgtcccactgaccaaagccaattacgtgttcaagctcagattcaaggaaggagctctcacttctcagggcagtgctgccaagagtttatgtacacttcagcaatctatcgataccacaaatatgagaggccagctttttctcttttaaaaaaataaagcttataaaataacacaagtacataatttccctacacaatgagtaactagattttatgttttctctttcggttttcctcaaaaacttgtatagatcatcttttgagatgaatagcggagcccttgtgatacaccacattctaagaatgctggggacactgtattcaacccaggacagctgcctaaggttgtatagtctgtgcaccgcatgatgcaggagatgctattcatgccatattcctaaaattttgtatatttattgcaataatttcctggcaaacaatagttacatttctagagagaaggactgctttttctgattcttacaaaaatgacttgttgatttgcaactcatgctgacaagccatcctttcttaaatgaagaaagacttgtttaaccaatggcaaagaattctccaccttgtattgattatctttagcccctcatttcttctgccttgaagtgcatgatttttcctgttttctagagtatgaagtcactttagtcttaagtcttatagattgtgttagatcacattcatgtttacaagccaaatatttcacaattttcaagtaccttgtattcattgttaattttccaagtctgaaattgtttctctctggactcatttttatttcaagttctactctaaatgatttttctttttctgtttcactacataaagttctttcttcctctcaggggatctctgctaatccctttaaccaccgattgccaaagacattcacaacccctgtgttggcttatttctttgttaagtaaaattttttcatcctttgaaattgaaaacctgaaacattttttcttaagtctatgaccaaccattatttataaagctgtatcatatcttagaattagcatattagcatcagttgcaaaaaaaaaataggcaatagagaaaataaaagatatatgtatatagcatgaaagttactgcaaaaagaaaatgaggctgtgtgtgtgtttgtgtgtatgtgtctgtgtgtgtgtgtgtgtgtgtagtcgtgcatcgcttaacaatggggaaatgttctgagaaatgtcttgttatgcagtttcatcattgcacaaacatcatagactgtgcttataccaacctaaatgttatagcctattacacccctaggccatacagtataacctattgctcctaggctacaaacctatacaacatgttactgtactgaatacagtaggcaactgtagtgcaatgatatttgtgtgtctaaacatagctcaacatagaaaagatactgtaaaaatatgatataaaaagataaaaatggtccacttgtatagggcacttaccatgaatggagcttgcaggactggaagttgctctgggtgagtcagtgagtgagtggtgagtgaatgtgaagtcctcaaacattaccgcacactgctgtagacttcagaaacactgtacacttaggctacactaaatttacaaaaaatatttttctttcttcaataataaattatttactgtaacacattttactttatgatttttaacttaattttaactttttgactattttgtaatcatacaatttaaaacacaaacacattgtacagctatacaaaaatattttatttctttatatctttattccgtaagcttttttccatttttaaattattaattttcatgtatgtatttattttcacttttcagactttttcgttaaaaactaaaacaaaaatacacacgttaccctgggcctacacagggtcaggatcatcgatgtcactatcttccacctccacatcttgtctcactggaaggtcttcaggggtgatatactcatggagctgtcagctcctgtgataatgataccttcttctggatacctgaaggaccttcctgaggctgttttacaattaacctttttaattagtacaggagtacactttaaaataatgataaaaagtttaatatagtaaatgcataaaccagtaatgcaatggtgttttgttttgttttgtgtttttttgttttttttgagacggagtctcactctctcacccaggctggagtgcagtggtgcaatctcagctcactgcaacttccgcctcccgggttcaagcgattctcctgcctcagcctctcgagtagctggaattacaggcgtgcgccaccacgcccggctaattttgtatttttagtacagacagggtttctccatgttggtcaggctggtctcgaactccgaacatcaggtgatctgcccacctcagcctcccaaagtgctgggattacaggtgtgagccaccacgccccacctaatataattatttattattaactattatgtatgtatataatcatgctagacttttatgtgactggctttgcagtaggtttatttataccagcagcaccacaaacgcatgaataattgtgcaatgataatagtgcacatgagtagttgtgctctgacattatgatggctatgacattattagacaataggaatttttcagctccattaaaatcttataggaataacactgaatatgcagtccgttattgaccaagacatcattatatggcacatgactatatatatccttaaagttattatgaaaactaacactgaatctccatatttacttctcttcgaagagtttaaaggattctaaaatttgtatttgagagtgagtgtgcaagaaataaggaaggtcagaaaagttttacatttgttaatctcatcctgagagtattttttgtaaattaaaaatacatgtattttcatcaacaactggctcacattccttaaactattaaagttcccaggtagacacacatgcatgtgtgtgagtgcgcccccccacacataatgatgtgttttagttttgcatctgaaggaaaggaatgctaggttttcttgcccataaatttatttttttaatttattttaattttcttttttttttttttttttttttagagatagggtcttgctttcttgcccaggttgctgtgcagtggcatgatcatagctcacagcagcctcgaactcctgagctcaagcaatccttctgcttcataagtcactgcatccagccttgcccacaaatttctaattttacctcttcttctttatatcttctgagaagaaagagatgtttcctctatcagtggtcatttatagcctttctaagtctaaggaagaattgtggcagacataaagatcgttgaatcaggactaagaaaagtagattctagctgatcttgaaagactgacttcacttctctggggagatgatgggtttggatgaaataattccagaagactttcccatttttactcatctctgactctattacagcttttctatttcacccttgttcccaactctcatcaggaacttaaaagaaagacacaaactcacaaacagcgagaaagagagacagagaaaacaataatgtagggtatcagtcatctattggcacaataatgctgcataacagaccatcctgaaactcagtggcttacaataaggttttgtttttttaattcacgtgtgctggagcagacctgccttaggctgtaggtcacccaaccttggctccaggctaagatcctgaaagaagggctcaaatccactccctgtgtcttaatctaagcccttagataaaggggccacctcctgggacacaccctcctcctggcaaacaatacaaacataggtcctggccaaacacccaagcacacttaaaccttcttctcgtgtccaatctgctgacattccattggccaaagcaagtctcgtgatcaaactccaaatcaatgaggaatgagagtgtgttctgtccacgggtaggagggatttggaaaagccatagatatttgcagaacaataatccaattttccacattctgctacaaatatcatacactgaaatgccttcagaaactgacaggaatgaagcaaacagcagagggaacacaccatcaaaatcaggcagcagggactcagcctcagggtcaaatgtctcttcttcttgtgtttgtttttttcttttgagacaaggtctccctctgttacccaggctggtgtacagtggcacaatcatagctcactgtagcctttacttcctgggctcaagtgatcctcccacctcagcctccaaggtagctgggactataggcacacaccaccacacctggctaattattattattattttttttttgtaaagatgggattttgccatgtagttcaggctggtctcaaattcctgggctcaagtgaacctcccaccttggccttccaaagtgctacgattatggatgtgaaccatcacgccctgccagatgtttgatttttaaagaggggagatagaaagtcacagtcttttgtctaaattttctatttaaaaaaaaaaagttagaaagcagcttactttctgtctgtctgtatacatatggaaaattacatgtatgcatatgtatgtatgtgtatgtagatgtatgtatgcatgtatgtaatatatatgtctgggtaaaacaaagcatctgcagaccagatgtaattttgagattgttatttgcaagctttgactagaaacctctcttgtttaccaatatatgaccctataattacacatctaagatagttttaaaatctttctgggccaggcacggtggctcatgcctgtaatcccagcactttgggaggccgaggtgggcggatcaaaaggtcgggagatcaagaccatccttggctaacacggtgaaaccccatctctactaaaaatacaaacaattagccgggcgtagtggcgggcacctgtagtcccagctactcaggaggctgaggcaggagaatggcatgaacccgggaggcagagcttgcagtgagccgagatcgcgccactgcactccagcctgagcgacaaagtgagactcggtctcaaaaaaaaaaaaaaaaaatatatatatatatatatatatatatatttcttttgtattcaatgaggccataatttcatcctgccccatgcagagttaacacgtggtcaagctctttggcctaaccttgtgtagatctttcctaaaaactaaggactgtgtacctatgatgttacaatgttgcattactagagaaacacaggatttactcagcactttcaagtacatacattgacttaatccacatagtaagtgattctattagcattttgtagatgagaaaactggggctcagaaaaattacatgaaattttcaaggtcgtagggctatagcagagctaggtttctaggtcatttaactctttctcaactggcaaggaagctaagtaatcacagattcacagaacaccaaaagctgttctggctactgttatgatttgattctaatattaattatgtggttagaatgattgtattagtctgttttcacactgctataaagaaatatgccagactcaggaaagaggcttaatagttcctcatggttagggaagcctcaggaaacccacaatcatggcagaagacgaaggggaagcaaggaccttcttcacatggtggcaagagagagaagaaagaaggaggagcttctaaacatttgtaaaaccatcaaatattgggtgcaccaaaatctcagaaatcgccactcaagaacttactcatataatcaaatactacctgtttcccaaaaatctattgcagtacaaaataaatttataaaaagaaattaagcattgaaaacagatatttctttcctggaaaaaaaaatcagatcttgtgagaactcactatgacgaggagagcacatcacctccctcttaacacgtggtaattacaatttgagataagatttgggtggggatacagagacagaccatatcagtggtatttcaaaatatcttccttttgagtcatttaaatcccttatttgatgcagagatagtaaaagccctaccagataatcaggaggttgctattatccttttttgtactttgtttcatctgctcttatgtctttgaacctcatttccgtcagatgattaaataatgattatcttgtctacaaataattggttttgttttgtgatttcacttgacctcaagtgacatgatacagttttaagaatgtcacagatgttaagttgtaaatcagggagtgctattttttttaatcagagaaatatgatgattcagtgtttagaacatattctttaaaatgaggggacagagattctaaacttgattctgctgcaaatcagctatgtcatttggggctctgacatctcattttactctctgaatcatctaggaaaaagtaagatgatgattacaaagcactgggagctctttcaaaaggcacagctttcatctaaaatgatattactaattaattaatcagatcaattccctgttaactcatcctaatagcccaagccctgttagccaagtatattactgtgatttattttgacacttaatggaaccgtgcagcatttcagtcacaggttgataacctaagcattataaacttcaagcagtgtttatagttttgttgttgttgtttttcctgaagacagctgataaaagatacccttttaggaggtgctagctacatccctcaaatgataaaaaatacaaagtggtgagtagatgttatgaacagcattgtccttaaaagagaagtcaccactgatctcgaagaaaagtttgcaaaataaggaagaagaagatgaggagatgcagtcttcatttcatttcttttcccaatattttgctgctgttttgtttttaatatcttccttggagcaatgaatcaaatgtcttccatcaaagaaaagcaatattgatatacatttgcacatagtaaaatctgcatgaattcacggctcctggaaaggaaaatattttctctctttctctcttcctgtgtttctttaatgtaataaaatagcttcccttggaggtcaaaggattctgccatttctcttttctgtgctctaagacagttgcaaccacttgttttgaaacttgcttttggttttggggagttttaatggaggtattaactggtgcctaaagggagcaggttatgtatatgtaaaagcagggaagttataggaaagtagctataaagactctaagcagttcaagagagttatgttaattgctgtttcaaaatgctcccctgtagtgggagccttaggcctccagaactcacttttctctcagtgactcttatttagtttattttcctttttatactgtgctttttagagttttcctggtctcttttactttgaaatctcaaaggctgtccctcggaggatccactgtttacttctgaacactttctagagattctgatgggtccaaattccccaaggagctggtaaaggtctgcttcctcccttcatgctgagtgtgaaagaagggaagagtctttcacttcaaacttcagagaggtctacctaactggagagtgaaccgaaactctgaggagcactggccagggagggggagggcagcacactgcactgtctcacctgggcattttcattgtcacccactatgaaagatctgctaggagaatcgagtttcagagaaaaaaaggaatgaacatattttgcatgacagcagtagtatttcccctctgttccccttctacagagaaaaaaaaaatgtgttaatgactttctaagaacaattactatataaatgtgacaaatttagattgaatttggatttgatcctcttctcacacccatttaaattggtttgtgctcctagctcctgtgccatatcctatgtggaaatttaagaatgacaaagttcataaatttggaaaggagaagtttgtttctcataaagggttgcagcttgcagggtggccattctgacgggctgagaagtgtagcctccagtcagaagccagaaacagacactttgagggaggggcaaagggaacaggaatttatgctgagctagtgactgaatatacatatttaataagctgtaggaggagtcatgaatatttgtgatagaagaaacatgcacagatccagcggagctttatgccccttcctgagtctcactacaaaaaaatggcagtacaagcatgatctgagggtggcgttttccatgctctaacatcaataggtgaagccaaggtcgcaaaaactcttactgcacattctccatagactggacagaaccattccatggtcagtgttctcttatcagccaaaaaaggaagggcagcctcaggcagatcagtagtgtggtcttttgaaagaactggtttctgtttagcccttagggaataaagcctaattgtgattagcaagggagggggtataacaaggcatgtctgacctcccatttcattatggccaataaagcagttttcaagcttattttggggtccctttggccaagagatgatctgttcggtcaggtgggggacttagaattttattttccgtttacatatggaatagccaaatattttatgatacactttgctagattgtgaaatgtttggcaaatgaaagaatgggacattttcggggcgaggggaaggtcagcgaattcatctcaggatatcctgaagaaatcaaataatgaggcagacaagaccacccttgaacagactgccatatttcttgagcttcaggaagtttctttggaatgccaaagtaagaataaagttggcctcccatgaatactagggcaatttggtgatgcttactcagatccaaagaaataaattataacaaaactggaaaagtacccatgaatcagggccaaatttataagcatacacctaaaagtatggaattccaggcctgatatgtgaaacgtaaagccctaaggcaaatatatttcatgtgggttggcataaggttgcttccattttcacagtattttaaaaaacaaaatgaagtttttggcaatgcttcacaattgtagttttcacttaaaaatacagatttctggcttctcttggaagactaggacacacatgcccaagaattgaatagcagctacttctttcggcagtaacatgaactcacctggtccatgtgttcatgtcttacccaccatcccctcacacacatactcccaagtatctgactcttgacacttcccttactcccttgacctgctgtacctctgttgctgttctatttatcaagcaggaccctgtcctctcccaaaatattctccagagtgatggactgtgttttctgggaggcttctctcacctgaaggacaaggttgacctgtctggctgcctttgctggctgatgctgactatttccaactcagctctctgctccatttggtgctggcttcttccagttgtggatcctagtctgtcatcttgacgacactccagaccacccaaaatgtcaacttggcagttgtttaaatcaaatcatataataaaataattaagctgttaggctgtgctgatatacattgatactcttagtacacacacctgcaagagtggtctctttgtaaactacatgacaacgagaacattcccttttaaaagttcctattttcaaatctgcctaacagcaacatatttgctccaaaactacatttctattttacaggagagagaacagaaaccaaagcaaaactaaatttcatgtcttgattactcaacaagagagtgtattgatgacacaagttgtcctgggttaggtagtgattatatttaagtgccatagaagattttcttggaagagattgcaatcactataagtacttagcattgcattgcttacatgaaaagaatgcgactgttgagaggaaaagaagcctctttagtatagattagtcttcctattgtccattaattatgaatgaaagttgaaattcggctcattgtgattcaatgctagattctataaaaacaacagtgcttgtttaaggaactgcctggaagatctgctttgctcttttgctggtgcagttacttgtggaggttataggaatttagggacatggatttttcctgttactacagcataaatatgttgtaatatacaaatatacatgtatatctgaatatgtatgctgtatatatttacacacacatacatattctaaaactcttctacttcaaccagggcagcagctactcttctgtttagttttatataatgaggttccatataagattatacttaaagagaaagtgccggtttggttaagtaaaatttagaaaaatactaatctagtccaactgtcctattttctgcatgaagagaccactgagagacatgttttttttttttcatcacactgttggttagtgacagagccaagttgattcttttttttccttccttccttctttccttccttccttccttccttccttccttccttccttccttccttccttccttccttccttccttctttccttccttccttccttccttccctccctccctctctccctccctccctccttccttcctctctctctctctctctttctttcgagacagagtctcactctgttgcccagactggagtgcagtggcacgatcttggcttactgcaacctctgcctcccaggttcaagcaattctcctgcctcagcctcccgagtagctgggattacaggcatgagccatcacacatggctaatttttgtatttttagtagagacagggcttcaccatgctggccaggctggttctggttttgaactcctggtcttgagagatctgcctgcctcggcctcccaaagtgctgggattataggcgtgagccactgcaccccaccagagccaggtttagaatacaacgctcccaactcctagtcagtgttctttgtactgtatttggccaatatgtattgattgtttgctatgcacagacactgtgccaagattgaatttcctcaggtgataatcccactaaccccatgaggtcaatcttacgtatgttagagaaaaggataaaaaccctcagggaagataagtaacttggtcaagtttgcacagctacaaagtgcagtgtcaaaaattcaagtctaatttaatctaattccaatgtcaataactgtactcttatccacttctctctactttcctcataaccatttttttcccaggttggtagaatagaccacaaaagccaactttgtgtgcatttctatatccatatataaaataatataccaaaatacatttgatcatggcatatttattaagtgttctatattactctgagctctattactctttaaaattttttaaattctattcataagcgacacataataattgtacatctttctgaacttcattcttaaaggaacaattgtagctgcatcgaagttgacatcagggcaatttctgcttcacagattttgagggcctggaagaagatttgatgagaatattttaatccctggatgaattttatttacctgtgtaggcaaaaacttagtaaaagatctttgaaccctaaatattttactttaggtacagaggttataaaatacctctgtacctttaggtacagaggttgaaatgaatgaactgttatcttagatagtatgccatttcagcatgagaagggaatctgaggatttattatctataaacacagaatattcttgcagaatatcttcaacaagcacttccagtcataattgaaggaactgaccagcaaagagagaagggaaagaaaagtgatttatagctcatatgctgtcttgataaaggatctaggttttatgaaatattatggaaactttaagtgctgagaattctatgcaatctaatcaaagattgtagtgctgtgagtaaaagaaaaaaatgtaacaacagagagggattggagaggagtggaagaaacagcaagtaggaatcacacagagactaacaatgataattcacaatgataattcaatttaagctggtcctctaactatcatatcccatggggatcccaggagttacctggagactcggcattattattcagagaacacttggaattaatgcctctcttattgttgaaattctccctagagttgtttgcatacaccttgatatcgatgttctaagaagctattatccctttatgtgcattagatcacagaacagctacattagagatgctcttgaattttgatttaatcaaacaggcatttttatgcttcagtcctaataatggttccagtggttcatccagtagttcctgatatttgggtaaagaggtaggcaatgtgagctgtccattgagatattttgctttgcttaattcagtgtgatgctgtgaaactcaaccaataacagtttgaaagtgtgcccatgtatccaaataccaagtagcagcaggaaaagagttctctgcagccagtaacaattagagatttattaagactctggaaaacttactggctggtcaaaaaaaccaatgataatctccacctcactcagggaatttaaggttgtttgtttgtttctttgtttgtgtgttttcccctccacagcctaaggattcagaaaggtcagaaaaacagaagtcacttctcttgatacttcttcccataaagacttacctttctgccagggaaagatatagatttgtataacttccattattgtagaaaacacaaccaagaacctgccgcaggagatatcctgaaaaccattgcaactgttccacgtggggcgaaaagacatctctagttgtgttggagccttattgatgttttgtattgctatgttctgctgtgccattcttgtatgaaaaacaggaaaaagataagttataaggcattttagcatatcagagcatggttagcacatttagcttagaggagttgctccattacaaaattacctctttgtaaatcatattattaaaaaaaacacacatctgtcttctcagggaattgccttctgaatataaatctttgagaactgatacttaaattccactgtaatttaagtttcactgtaattaaccaacattttatggcctagcccacttctgccttctaatatatagtttagtgggaaagacacaagttaaacaaacagaaaaataaatatttatttaagattctagaaaatcttttaactggacagagaacagccttgccacatgagagaatagactaagaatggcttacattaagtttactagtctggtatgttctctctgagcagatagttaagctgagtcctgaaggatgagacagtaaaaccattgggagaacaaaggaagaagactaggctgtgcagaaattgttgtggtttgaaaaagctgagtggggaacgggaagaggcccaccttgccaaaaaggtatttaaaaacaaggaagaagagggcaatgacatgcagtggtaggcaaggctttatcacgtaagactttaagaatattgtagctctagtgaaagtttgaatcagagaaatttaaatacctaaatgtcactttgaaagatcattctaactattgtttgatgaatggtggttgctatagggcaaggggcaaaatggaagttcattgggaggcttctgtagttgtttacaaagtaaacaatgatggcttagactagggtggtatccatagagagagaagtagacagattcaagatgcatttttgagggaaaactgagagttgtatgaattcagtgtgagggattcaggactatgtgacatctcatgaatgccctcctggtttctgctctgagtgtgtgggtagatggtgacattatttactgagatgacgagggcatcatctataccttgaatacattgaatgtatttcttaatttctccctcattcctccttctccctttccttaccatgtttctctaaatcctagctatcttttcagattcagcatgcttaataaacatattgagtaataattaaaataataagtttaaaatttttgagtggttctaaacactgtacatgcccaatttatttaatcctcccaataaaactctataggagaaattctctttacaaataaagaatgtggagacacagagagcatacataatatgcctaaggtcacacagctgtatagcaattgctaggaaaagcaagcatttacctttacagagttacagtcaaatgcaggtggcagacttacaaacagactgatgcaatgctttggcaaagctgttttaacaatggtttcagtggccttctatgtgacccatgcaggggaaactgatctggccctgggcaaatgtctgtgctgttataacaaaataccacagactgggtaatttataaagactagaaatttatttcttatagttctgaggctgggaagtccaagatcaagatgctagcaggctcagtttctgatgagggctatctctgctttcaagatggcttcttcttgctgcatctctggaggggaagaacactgtgtccccacatggtggaaggtggaagtgcccttcaaatactgtctgaagtctctttaatgggggcctcaatcccatttatgaggagaggaggcctcatgacctaatcatcttaatatgtacacattggctagtaattttcaacgtctgaattttagagaggacacagtcaaatcatagcagcagagataatgaagacaggctttctagaggggatgatacccgagctacactttgaaaagaaggtaaaaatcctggtggaattaatgggggcagggaaggctttctcaggtaaaggaacatatatgcaaaggacactatgtagtggggtaagagcagggagaaataatgagatagtattgagggacaattgatgggaaatatggctaaagagatagattacagagatgaagtctggtattcatagagatgtactttaattatttaaaatagatctcttggcactatatcgagtcgatgaattggggagggcttaagtcacaagtctagaaatacaatttgaaaacttgcatttttatttttctattggagaaaaatgatggtttgatacagagcaacggtgttagagatgaagaaaagatgaatttgaagattaaatgagacaggacatagaaagcactcagcacaaagtttggcatagattacctacataagaaatatcattgtttcagatgtctgttgctgtttaacaatccattgtaaagcttggttgcttaaaacaacaaatacttactattttcttctaattctgtgagttgagtgggctcttctgggtggttcttctagtcttcagttgcaagtaaatttgatttaattgattatgactgaggtcactcatgtagctacattcaatttcaactggactggggctggagctgcaagaatggcctttctccaaggcctcttttcagacaagctttagtcattcactggtctagcctggacaacatggcagctgggttctaagagagagacagtggaagctgctaatgctcttactgtatggtcccaaaagccctataaccattttcctttcaccttcaaattggtcaaatcagttacaaggccaacccaaatccaaggagaggggaaatagagggagacatatgcagatagagaaatggcaaaaaaaaaaaaaaaaaaaaaagttgttggtgactgtatttgtagactgcataccagttatttaaattgtctaatgccaatttaattccttaaacagcattcttcatttatatttgtattagtttctttctctagctctataagcttcctttctatctcacacagagtctttcctatcttgtactaaatctatgttttagggtttttttccccttaatgtcccggagaatacaaaacagcagttaccggaaattcaatttattttcctagctgaggtaaatatttttcaaaattatagtctttatttatcttttacattctttcttttttaaattttcttttttagttgctgaatattttcaaacatactggttatgcatatgtatgcctgtatgtggcttgtttatttttcttgactgactattgaggatgacaagtctatacagtctatccatgttttctatttgcataaaaattgtttgtctcgattctccttgagacctgggcagcttgagttctccccatttatatgggcatctttaactcttgaggattgtgtgctggaggtttctaattagcaaagtggaaaggcagctacagtcctagttgataaatactttacgtcatggtttttgtcttgtttgttttgcaaagaatgtatcagactgctgtgttcacctgaccttatttctagatacaccatgtggttctcatcactatcactctggagtttctacctatcactctggggagtctccagtcctattggaggggtatttgtctcattaattaaaaggctcctcctggtttagtcacctatattgattaaaagtcatgaaaattccactatctttctctttaatgatgccttaggtaaggatacagcttactatccaaaataggacacttttaggataaagatacattgttaataatgtataataataaataagacaaaaaatgtaactattttggaaaatgaggctatatggtcactcaagtgatgccataactggagcttttgcaaccagtgtgtctccagttgcctctctttccccgtagccagacctccatccatgtcctccagactggtggagtttaccccagtgggagcaagtttacactgatattagtagaaactgtgcttggaaaaaaatacacttaaaatagactcatgctttctcttcccacttcacacggatgctgacccacgatgaggaaagggatgcgagctggctacctatgtctcagttccctcttccttcaaaaggtgcaaatattaaatagtttgcacttcttcccctcaacatttcttgcgatattccttgaaagaaaagttagttgttagtggatattccatgtaatagtctcaaatgtcgaatctgtggtagagagcaaagcatataaaaaaattataggggattaagtgtgtgactctacagtttgaaaaaagcactgtagctagttttaacatgcagtatctctgacttccccagcgcatgtgtattgagaaccactatcctctctgatgtaacagtaaggtgtgttgtaacaagtgcctggtagctcatgctaccaggatcaagaaaaattagctctgaggaatgatttttttctacttttattttatatggtattaatcacatctaagtaaacttgctttttgtttgaagccagatgccccaacagaccaagttacacagaaaagaaatttatgcatctggtcattaatgcatatttggcccctaatagctacatgtaaaataattcacttgaaaacattactcatttttgtcaaagggctgcacaagagctttattatacatcttatttttaaactgacttctactataaatgaagttttactacttcctgatcatcttcttctgacaacttgctattcagtttttttggcaaaataaaataacaataaaacgtgattaatttattgatgaatggatggagaaatagatgagtggatagacatatgattaaaacaagaacagtaaagctttagtggtagaatctagatggtggataaatggggggccatggtagatttctttcaacttttctgaattttgaaaatttacataataaaatgttggaaaatgattacttattattttctattaaaaatcacggagtaggccgggtgcggtggctcatgcctgtaatcccagcactttgggaggccaagatgggcagatcaccaggtcaggagatcgagaccatcctggctaacacagtgaaaccacgtctctactaaaaatacaaaaaaaaaattagccgggcatggtggcgggcgcctgtagtcccagctactcgggaggctgaggcaggagaatggcgtgaacccgggaggcggagcttgcggtgagccgagttggcgccgctgcactccagcctgggtgacagagcgagactccgtctcaaaaaaaaaaaaaaaaaaaattaaaaaaaatcatggagtaaagggaagttttgtagtgctgtcctctctctaactgaacaagagccactaaaagcagttagaacacaagttccaagcaaaacaaaacaaaacaaaaaaacacagcagtggctctgaagctctccctcctgtcagagatcgtgcagtccagatggattcatgggaactgagaactgactcctgccgtcttgattctcttggagaatatagattccctctcccccaacaacaagtgtcgtgatcctgaaagacgtatctaagaattctttacatcgagttgtaaaacctcaggtcatttaagtgactcagtaggggagaaaaaacataaggcaaacagaaaaagagggtaagtttagggaggaattatgcagcagagttattttctatgttctgtaagtagatctttaaggggaggagtgttctctgaggtgaaggggtgtcaaggagtgtcagattgaagcagagagccctaactgaaaggcttttagctgagtttccctgaggcaggtcctcaggtgtccaacattcctgagcagccactgtgcatgtttcatcatacatatcccaccgtgctttctcttcatcccgatactcttctgcacaaaatagccaccctaactttaaaaatcaataatacttttggaccagttgaaaaaataagagaaattaaaagaataaaagcaaaattaagggatattaatataaagcagatggacatcatatatcacagaaataatacccaaagagacacaggaatattttataaaatacttcttcatatccgcagagttctggttaacatgttttatcaaaaacaagcgatcgaagaatagatacaagggttcaaataaaaagtaatggcataacataaaagcgttagagttaagccccgttaaaaataacaaaaggagaataagatggactaaaattaaagactaaggagatgaatttgagaaaatcttaacaatattaaaaaaaaaaaacccagcaggggcaaatcattctagattagatgacagctattatagacagtcaaaagatatccagtgtattaataatttatgttgctcagaacaagtggaagagaaaaaattatatttaagatagaatgagaaaacatgagttgagaaacatgatcctaatttgtaagaaaaaaaagtgtgtgccagaaaaaattgatgaaaattttcaatagcaaggcattataatattgaagttactgaactgcaaggataaagaaaaaaatatcacatttctatgtaagcagaaaaagtaaattaaatgtgatgcttgatgtattatagtatctgatgccagaagatagttggctattgtctacaaagttaaaaggaagaaaattataacagaataagataatactcctcctttttcttttgaatagaaagtcaaataacaaattatctcacatatgcaagaactgagggacgagagtagacttgccccatttttggtgtgaagggcaggtggacacaaggctgtgaagttcagccaaccaagagatctggactcttgaaaatgaagggataaagaaggtaaagaaacagtgtcactcaatacatatatttaaatttagaaagcagataaaacaacaatggggattatagttataaatagaatacaaacattttaaaccttgacaatacaaaataatcatataactatcaaaattaagtgattgagatggcatacaaagtgtaagtgtcccaatttttgtatcccatactgtaggaataaagaaaatttttgttttgttttgtttttgtttttgtgtttgtttttgagacagagtctcactctgtcgcccaggctggaatgcagtggtgtgatctcggctcactgcaacctctgcctcctggttcaaacgattctcctgcctcagcctctcgagtagttgtgactacaggcatgcgccaccaagcctggctcatttttgtatttttaatagagacgggatttcaccatgctggccaagctggtctcgaactcctggcctcaagtgatctgcctgcctcggcctcccaaagtgctgggattacaggccgaagaaacattttctactgttggcatacatagttttatgtatatacttatttattttttatttcaacttgtattttagattcaggggtacatgtataggtctgttacatgggcatattctgtgatgctgaggtttggggtacaatgaatcccatcactcaaatagtgaacatagtacccaatctgtagtttttcaactcttgcttctctccctccatcccccagtaggagtcccccgtggctgttgttcctatctttatgtccatgtgtacccaatgtttagctcccacttgtaagtgagaacatgcagtatttggttttctgtgttaatttgcttagggtaatggcctccagctgcatccatgttgctacaaaggaatgattttgatatttttttatggttgggcagtgaaatacatagtttgcccatattgactccaacttttaaaatgctttaaaaatcttcttttttaaaaaatttaaagaaatattttagaaaataaaatttttgtgctatggaaatgttatgtaaaatctttcaatttaacttttttatcacttgaattcaagtttaatcttctctcctgtgaataagcctactgctgtatgaaatgctgtttaccaaaggatgacaatgattatttctgaatttgggggaattgcaatgttttttattttacttttctgtattgattttttaagtctatatcactttttcaagaaatatactctttttaatgtaatcgtttccatctggtgttaacaaaggcaaagaatgactttgaggataattctttaatctttccatatccacaggcagctcatttgagcacgagtagttagttgctttgactggatagtgatctctgttagccatgaaggtggtaaagtcactggaatcatcgattccatttagattccagtagcttagacaaaaagcgaccagtttactaaaaaccttagaaaacaccttagaaaacacctggaaatgccacacttaactgccgttgctgagattattagagttttgctgctgttgttgtgggtatactttaagggtaactaaatttccagagccataagtatatgaagccttgtccttcgtaatagtggaactgaagttcttaagaggggctcaggaggctgactcattgtttcctcttaggaagtattggtatttaacatgtgatttaaaatatctataaattgagttatgacatgagttttcacatgatgaccttctcaccaatgtatttgtgtaattttgatgttagtggagttagtttatgtagtgaaggtggaaaaatgtgttactaagaggtaattactgtaaagctatttaattattgatttccccaacatagcaggattgacattttgcagatatagtgaaggaaaagatatgcattaacagaatgagaacagaataaatgtacgttttaaaaagaaacacaattcattttaataggtatgcagtcattattcaggaaatgtgactgcttctccataaatgacattagctgtttaagttaaaatgacagacctataataagtaaagatattatgagggcgttttaaaccctagcattggcgtaaggttatattaaaacttcatatttaccaacattgtttttttgtagtctctgtcttcattaccctttatgaaaagcacactttattttgaagtatttatattggcttgtgcttcattcttcacttagaaaagcattttgctttgcatatttgtctaatagctataaataaatgcagctacttcttcccttgaaatgagcaactttgcattttaggctgaatgaaaaagatcagctcaggacttctacagaagttccagccttgctgaatccttgctttttcatccctggtttatctgcctttctgatttctagccacagcgaacaagcatctgactacatggtaatgagcccttaaaatgacaaaaagaagtgcttacacattcaaaggagttttagcttctaaagaatagcctttggttgaaagcatgttttgaactgtcttttggattgcgttcagagtcagtgtatgagacccacaagaaacaatgcctcatttaattacggcggcacatgattcctaacataaaatcatatgacccagctggtcaacattcatatcaggcaagctttgtttgaaataatattcagccatttttcttatatgacagcaaaaacacaaagggaaggatttgtcaccatttaaataattcaaagaatgtaacagcgattctaaaatgagttcccaaaaatgaagtttcagaaatattctgggccataaaagactattgagtatctaagaaaaagttggaaatagaaaagcttaaaaaatgaaatctgcagaatgaaaaggaggtggcaaatataaaaataatgaattgaaaagtgaaaaaatattttcaaattgattaataactttaagtactttttggaaacactacataaagaaggaagaaaacacaagtgcataaaatttaaaatggcataaaggaaatgagagttatattagaaattaaaagaataataaaatagtgcttcataaagctctacaaaaatgcatgttaacaattctcaaaatttgaggaaccaagtgttaacaaaagtgattctacagaagagatgaaactcgttgatgaataactatgaaaattatatagaaaattattaaaaaggtatagcaaaaagaaatttccagactcaaatggttttcaaagggagaattcttctgaaattttaaagaaccaatttactaattacttaagctttccaaaacagagaagtaatgcagcctccaaattttttatacaaagacaatgtaacatctaagttgaaatttgatagagatgatgaaataggacaaacttataacagtcttatgtaatataatcgtactactgttggggccaaaacattaaatgttagccaaatgaatggtggtatattgaaataattgtgtgtcattaatcaagaatatgtatttttcaaataaatattcagcatcaagttaaatgataaaaattttgaatttttacattcttattatgaataagatagtaatgcctactatccccgccattaaaattattctagaaatagcacatgtaattcaatatgagaaatgagaattaaaggtataggtattggtaaggaagagacaaaaattattgttagttctattcctaagggactttatctcaggtatccctctctgacaacataattgagaagagaaatgagcaagagtcagattatccaggaggccgtgtctagggttcttatgtgatttatgtctctgatttatgtaaatattgacaaatatagattaatctctagatggtagaaaaaccaaaggaggagcccctgctcacagagaaaataaaagatgaattcaatgtttcttagatccagcttaatctaaaccatggggcattaaatctttttagaaaaaaaattatcattagttgctgcttatgtaattgtatacctagtaaatgcagtggaatcaactgagaaatgtgcaaaataattagttaatatagaaaagtaccaggaacaaaatcattagctttgattcttcatcttttctatttggtcagtttaattatatacagaaaatagatgtcaatgtatttggatgagttttataaagtattatgttatcattaatttcattttctctatatctgttattaccctgttatgattttaactgttgtgtacatgtctttgtgttctgcctttttcatttttattatgcttcatttttcaaaaggtctaaaactcactgatcaattctactattatttttctttgttttccatctttcctgtcaccttccttttgatttccatggaagtagttagtcattcttctcaattctttatttggatgctcaatgttctctccattggcaaggccacttctggaacttgatatttggagatttctttgaagttaacattcttttctttggaatattttaaatggtcacaaatactcttctatttattttcattgggtaatacaaaaaagtagttaagtttatctaaagaaagcttagctgatatacactggttgaccaaggtaggccatgtcaatctgtataaaaaaaaccatgtgtcactatgaagtaaatgagacattgtctcttgtgggcaattttaaaaaaaaaaggatgttcaaaatatgtttttaataaagtctgattatgtttcttttcagtagctaacattcatttagatgtgtaagcatcatttggggggatgtataatttttaagaattcattacaagtatcacaaaagataaacacacataaagaattatataaaaattagtagcattgtaaacaacccaaagcagttagaaaatacaatgggagaaataatccatttataatagcaacaagaaaagtaaaatgcctggtattaaagttaaccagaaatgtgaaggacccatatgaagaaaacttgaagctctaaagataacataaaagaattcttagtaaaattagagatacaggtattctttataggaaaccacaatattatacattgacaaactgacaaatctcagtttagtaagctgcaaattcaatgtcttaacactccatccaaatttatttttgtacttgacaaaataacacaaagttcatcatgaaaaataaaagtgaaaaatgctttgaaatgtttcgaaaaggaaaatgaatgagctggaaatagtattatctatataaaaatagccaacaaggctgtactagcttaatcagcttgacactagagaaccaatagattgtgagagaatgttcccagattctccagattcagaggtaatactggcattcaaatcattgggaaaagagctttttcactaggtggtgccgggacaaggtactaactgcatgcaaaaacaaaaattggatggtagtctcatttctcttaccaaagtaaattacagaaagtaaaaattaaactatgacagtttgaggaaaaacatgagtgaatttatttaaaattttggaattagtggaaagtctttccatgaaggacacaagacacagagcacaaaagagaaaacattaacaaatctataaagttacaaccaactaaaaaaaaatctgaactaataaaaatacagtctaaacatgtgacaggtcgagactaattttcttaatttgcaaaattttatacaaattagtaaggaaaaaatacacttaacccaagggaaaatggacaagttgctgaaaaagaaatacaaatggacaataaaaacgtaagaggaccatctttgccttcctaattaaagaaaggcgaataaacaataatgagatgtcatgttttaatcaatcagattgatagcagttaaaaaaagttagataatatccagtgtcaaatgaggatccagaaaaatagccactgttaatacattgttgcttgaggtgtaaattggctcgacctctttgtcagacatttaggtcatatgcgcagaagtctggaatatacatttcttcatgactttgtgatgcctctgatgggaatttattcaatagtatattcacacatgttttctaagatgtactagcaagaatgcttactgtaaaacatacaaactgaaaatactagaaatgatcacataacggacctggctgaaccattaaggtatatggcacaactgctgaaaggctaaataatcttaaaacatgaagcgtatctcttaatcttaaaacatgaagcgtatctctaagtgcagatatgaaaacacctacaagataaatgacgtcatttaaaaattaaagtgacgatcactgtgtataatgtggttcattttgtataaaaaaagactgtgtgtgtgtgtgcatgcgcatgtgtgtgattaaaatatatctggaaagaggtgagatattgaactccgattgcctttgtgtagaatacttgttctcagatttcagtgtgcatcacaatcaccaggaaggtttgttaaaacccaggtccccaccgtagagactctgattcagtgaatctggggtgaagcctaagaatttgtatttctaacagtttcccaggtgatactgctgcctctgttccaggcaccacactatgtagaccctctatggagaggaactaggcttttcacttgatatcttcctgttcatttaatttttagaaatagtatatgtatttcttttgtttttcctttaagatcaaaagcagcaatctgaattgtaagattctggggcattttaattttttctttatacttaatcacattttaaaaagccatactgttaaaaaaaattctaccaaataagatcaaatccactgctttttagttgctccttaaatattttgtttggtaattcatttccttaagaatagacttagtgaaatattaaatttttcttatatgtattcctcctaggtagatccttgtatcataatttgaactcagaagttagattggcttgtgtggtatgccaagaaataaaaatattttaagaatattggggatttacattattttatattatatataatatatatcataacatctatattatataaataaatatataattttattatattatattaagaatggggatttacattattttatataatatataatataaaaattagtggcaaatataaaagataataaaagatattttatatataatatatttaaaagaatgaaagaaccgtcaccattttctgtaaaataagaatgacaatatgcagcatgcaacagctatcatagagaaccacttaagatgacagacaacatggcaaatccttaaggaagactcctggcattgggatatgctgtcttatttgtatttctgttaatacagctttatgattgcattgcatttctgggtttgaactttgtaaagatttagagcaataacaacaacgacaacaaatggattgtccaattctatccactcctttttttcttttagcaagtcatattcctgtaatcttctcttgctattatttttcttttgttaagatttatattattttttatttattcagcgttcattatatagtctcccttaggagcactgaataacacatacaaacaaatatgaaatagctaaaaatttgaatccctgtcttgccaaccctcatatcttcagctggggcagaaaacctgagcaaacaggcattgcactagaccgtgtcggcagcaaagcaagctgtagtcaggttcccaagggaatgaattcttatgttttgttttccataccaagaccattttttctcctttcccctaaagatcaaatctggtggttcattagctattctggctgatctcagcttcctctgtgcatgctcttgtcttcccatccccacaactccaggggtttgatagaacaaggttaatactcggaatcacggtcaggagcaaattgattgcaagtggaggatgtaaagcttgtctgtcaccatctccttatggcctcaagttaagcaggcggtttgcatcaagtgaagctttaaaagtctcttttttaactgacatccgtaacagagaacgctatttctctcaaaccatatgccactaacgcctgattagctatgatcagatagaccgatagatacactattaaaaagaattgaaccccgtggctagttcctatgaatgttgaataagtaattaatgtcttcctctttcctaccccccacccaaccagtctgctgttatttaatttaacaagcatttgacggagcatatcttgtatgctaggtaggtactaagaaaagatctccttgtctgcacaattccaaaagttgccatttatatggattttaatgtgaatagtgcccccagggagttgtgcaattgcaaccttcctagccattcatgtcactaagctaggccaaaggagggggaattgttgtgacgagttataagacatcatttgtgccttgtcagagttcacataggagaacggttagtggggaaagaggtacagccacaggttactataagtcataaatcaagatacatttatgtttctatagatatctgactaaaggggtgtgggatcagcaatgagggtgtagtaaattctgcttgggatggggtgcaggaatcaagaaaggcatcaaagagaagacgacatttgatttgggcgtttgagaatgcgtcacactcagagccaaggggagtgggagggtaggccatggtgtagttggaaataacaagaatgccactgttgcccgccattgtctggagtgaatgccagccgggaatcatttaaacactttctcttgtaatttgaaggacacaaaccatggcttctctctcagtgaaagaccattattctctaaattgtttaatctgtagtcccgatttattaagatatgtgtggcttgtcttgggagtctgagtaatcactgacattgtataggggaatacatttgcatggcattataagaatgtcaagttgtctttcaaaactgagtatagataaaaggctcaccaatgcctgggccatctctgagtgccgactgtgggaacatccgttggtggcattcgttctactgtatgcacacatttcaatcagcccaaaaggcctcctgtccacagaaggctggacagtccttacctctcactcataatgccacattagcatttctattctcatgctctgtggtcataagaggctgggagatcttcggagagacatttctcaacctgtagacacaaaaggggtgctttgagctctttgaagggcagcatttcagtgggggtgcatctgttaaaagactgtgttgcaccccaacacctctggagactgaaagggaagcaatttgggatagcagaaatggacgcaggtattaatggaaggagattgtaataaggaatgtaaagaaatggaatacacatacactgccttatctgagccattttccatagtggtgttaactataagaagcccacgttaatactctgaaaatctatccccttcaatccctgcagctatacttcctgctaagacgcaaggcagatggacacattttgaggctcaggccaaaattcattgagctctctaattttaagaattttgaactttcctaccacacacacacaaattttagaagtcttttcctcttgatgtacacatttgtttcaagattgtgcctttcaaaacctttgcacgtaacaaatagttttgagtatgcaattaaataaagaagttatttaatattagctgtgattgaatgtgcaggctctaaaatcagattccctgggttgatatgcacagtatgccaactgaaacagtcacctctcttaatggaccttagtcttcccctctgagaaacagggattatggtcaaaagtataagaggtcatgtcagcagagtgccgggcatttggcaaatgctcaataatacttagaattattatctcctgaaaatttctttggtgtcagatgccatcaaatgtaacttctaaataacatgaaatgagtactggtaacagtgaattgacacgattctagccaaaagcaagcaaacttgacttttcacatagtttatagtatctcttcaaggccaagtttgctttgtgagattcactttttttgaaatgttgagaataacatatatatttgaatgcctgttatatatacgagctaggagtgtgtttgactgcaattaatagtgttctaaataattagcagtatattttcttacgtatcaaggtaggagtttgttgtccttgatttaggtgctcaaaaatgtccttgaggaaccagctgtttctgtcattttcttctagcaacctgaccttttagggttctttttttgtttgtttgtttgtttgttttgtttttgagatggagtctcgctctgttgcccaggctggagtgcagtggcgtgatctcggctcactgcaagctccgcctcccaggttcacgccattctcctgcctcagcctccctagtagctgggactacaggcctccgctaccacgcccggctaatttttttgtattttttagtagagacggggtttcaccgagttagccaggatggtctccatctcctgacctcgtgatccgcccgccccagcctcccaaagtgctgggattacaggcgtgagccaccgcgcccagccttggggttctatctttatgctagtgaccccatggttacaaagtagctgtgatatccaggcctcctaccagcatcacaagccaaaaagagctcaaggctcatcatcggatggtcattttttatcagcaaagtaaaagcttcttagatatatccccagcagagtcttccttatatctcatgggctaaaactgtcatgtagccacgcatagctacaagggaagctggaaaagcaagtaaagaattatcctgagtagactaatcataatctaccaactaagggttgggatgttgcagccttaaaaataatcagggttctattagcatagagcaatggttctcaaacttcagtgagcatcaaaatcacctgaagggcttactaaagcaaaattttgagtcccactgccagaatttctaattcagtaggtctggactagggctcaacaatgtgcatttctaacaagttcccaagtgatagtgatgctgttatctgggatcacactttgagatcttctgtataaagtcacagactttttctgtaaagagtcatatagtaaatatcttatttttggaagttatacattctgcaccagaaatttcagtgcaaaagctgccatagacatttcatgaatgaatgagcatagctgtgttttgctaaaactttatttacaaaaacagatgtgcactggctttggaatagaggatgatagaaattaatactgcatattgtttcagttattgtggtagtatagcaaattattccactttatgttcatgaattcagtgaattatgaaagagcacagtggggatgactcttccctgtcccacaatgtctggggctttaggtgggaagatccaaatgcctgtgattgggtgcttggggactggaatcagctggaagctccttcattcacatgtctggcacctcagctaggatggctaggatacccgctctgccctgactctggatcagaacacctacctgttgcctctctttgggactgagattctcacagcatggtgtctgagttctaagagggaaactgccaagaaaaccagggagaggtttatggtcttcatggacctgccctggaaagtcacgagcatcacttgcatctcattctattggtaaaaagtaagtcacaagcctgctcaaattcaaagggagaattaaacttcaccttgacaaggaaatgacatggtcacattatagaagggtatgtatgatgggagatattttttgtagctacctttggaaaatacattttgccataagcagacacataccaatgtctgttgcctccctcagacagattactgaggctctagatacctcattagaagcctgtgtcccagcatcagagcacagaatgtaggtctatcagagcatgatatgggaggatttctgggtatgaccactaagttttacctggccaatacaactgcttttctatggccccattgcctgtctagtcagccagacagtattgattttttatttcagcaggaccttggctaggttttcggggatagaatgaaaacaaatgaacaaagaaagaaacccggggtatgtatcatccatcatccaacatcattatttagcaaagacctttaatttcttttgtgtgtaagagtaatgccaagaactgccaagttcaaggcaccaactcttctcttcaaagagcttatgatcttttgggaaattgggcctatagttttaaaaaagataaatatcaatgaagaggcatctggtatgtcaaaagaaacactttatattgatatataataattgtacatatttatagggtacctgtgatattgggatacctgcacacaatgtgtaatatccctcacctcaagcgtttatcatttatttgtgttgggaacatttcaaatcttctagctatttttaattaggtaataatttatcattaactagagttattctaatgagctatcaaatgctagaacttattctttctatctaattctctaatatgtttgtacccattaaccaacctcccttcattcctcctcccacccacactttccagcctctgggaaccatcattctatccctcctccataagattaattttttagcttccacatatgagtgaaaacacacagtatttgtctttttgtgtctgggcgatttcacttaaaataatgcctccacctctattcctgtttcttgcaaataacagaatttcattatttttatgacagaacagtattccattgtgtatataaacatattttatttatccattcattcgttaatggacagtaaggttgattccccaccttgactatgttaacagtgcagcaataaacaggtgagtgcaggcatccctttaaaatatttgatttcctttccttttgataagtaatcagtagtgggactgctatatcatatggtagttctgcctctatattgttttgcataatggctatactaatttatatttccaccaatagtttataagagttcccttttctctgcatccttgtcaacacttttttttctttttctttttttcgtctgttcatttgataatagctacgctgattggagtgtagtggtatattattgtggttttgatttgtattgccttgatgactcatgatgttgagcaattttcatatgcctgttggccatttgtatgtcttcttttgagaaatgtccattcagattttggcctgctttttaatggaattctttgtttctttttgctgttgagttgttttgagttctttgtatattctgggtattagcagcttgttgatagtttgcagatattttcttccattctgtaagttatctcttcactttgttgatagtttcctttgctgtgcagaagctttttaatttaatatggtcccatttgcctatttttttgttttttgcctgtgcctatgaagtctgagccacaaagtctttgcctagaccaatgtcctgaagcatttcccctatgttttcttctagtagtttttatagtttcaggttttatatctatatctttaattcattttgagttaatttttgtataagagataaaggtctagttttattcctctgcatagggatattcagttttcccaacaccatatattaaagaggatgtcctttccccaatgtatgttcttaatgcctttgttgaaaatcagttggctgagccaccccgtccgggaggtgaggggcgcctctgcccggccgcccctactgggaagcgaggagcccctctgcccggccaccaccccgtctgggaggtgtactcaacagctcattgagaacaggccatgatgacaatggcggttttgtggaatagaaaggggggaaaggaggggaaaagattgagaaatcggatggttgctgtgtctgtgtagaaagaggtagacatgggagacttttcattttgttctgtactaagaaaaattcttctgccttgggaacctgttgatctgtgaccttacccccaaccctgtgctctctgaaacatgtgctgtgtccactcagggttgaatggattaagggtggtgcaagatgtgctttgttaaacagatgcttgaaggcagcatgctccttaagagtcatcgccactccctaatctcaagtacccagggacacaaacactgcggaagtccgcagggtcctctgcctaggaaaaccagagacctttgttcacttgtttatctgctgaccttccctccactattgtcctgtgaccctgccaaatccccctctgcgagaaacacccaagaatgatcaattaaaaaaaaaaaaaaaaaacgaaaaacaaaacaaacaaacaaaaactggacagtggatggtatcccaggttgaagaaacagcagaaacaaagactgggagggagtaatgtacaagttgtggtctggatagttgggctggagcagaggatgctggaggaggctcagcagggcaggtatgaccgtcacagccactggctggcactagccaatgcagggttcttctgggaactctggggtcctgaaactaaggcagctgaggaacttccagaatgctttaataaattaatatcaaacatgaaaaaaaaaaaagaaaatcagttggctgaaatacatggacttacttctggagtctctattatcttccattaatctacgcatctgtttttataccagtaccatggtgtttgggttactataggtttgtagtatattttgaagtgagattgtatgatgcctccagctttgttctttttgctcagaattgctctggctattcagggtcttttgtggtcctatataaatttaaggcttttggtctatttctgtgaaaaatatcattggcattttgataagcattgcattgaatctctagatagctttgtgtagtgtggacatttttattatatcagttcttctgattcatgaacaggggatgtctttccctttgattgtgcccctttcattttctttcattagtgttttctagtttttattgcagaagtctttaacattcttggttaaatttattcctacatatttccttttattttattggctattataaattgaattgctttcttgatttctttttagctaattcattgttggtgtttagaaatgctactaatttttatattaattttgtatcctgcaactttactgaatttgattgtcggatctcagagtttttcagtgaaatttttaggttagtctgtatataagatcatatcatctgtgggaagggacaaattgacttcctctgttttcaatttggatgacttccatttatttcccttgactgattgctctggctagaaattccaatactatgttgaatcagagtggtgaaagtcatcttcctattgttctagttatttcagctttcagcttttcccccttcagtatgatgccagctgtgggtttgtcatatatagcttttattatgttgagctaccttgctactatgtataacttgttaagagtttttataatgaagggatgttggattttattgaatgctttttctgcatctattgagatgatcatatggtttctgtccttcattctgttgatgtgctgtatcacatttatttgtgtatgttgaactgtccttgcatccctgggataaatatcacttgatcattgtatataaagttttcaaataaacaccctaatgatgtaccttatgtttaatcccttaagatattaaaaaagcaagaacaaaccgaatccaaaattaacagaaaaagaaatagtaaaggtccgagcacaactaactgaaatcatgactgaaaagcaatacattggatcaatgaagtgaaaagtcgtttttttgaaaagataaacaaaataaataaactgctagcaagactaatcaagaaaaaagataatatatccaaataaatcacataagaaatgaaaaatgagacgttacaactgatacaacaaaaatacaaagaatcattagaaattattatgaacaactatacgctaacaaactggaaaacccagaggaaatggatactttcctgaacacctacagtctaccaagattaaagcaggaagaaatagaaaacctgaacaataatgagtaatgagattaaattggtaataaaaggtttcccaataaagaaaagcccaggaccagatggcttattgctgaattctaccaaagttataaagaaaactagcaccaatttttctcaaactattccaaagacttaaagaggagggaattcttcctaactcaccctatgaggctagcatcactctgataccaaaaccaggcaaggacacaataaacaaagaaaaatacaggccaatatccctgacgaaagatgcaaaactccttaataaaacatcagcagagtgaatccaacacatcaaaaagagatacttttgatggctttaaaatgaagctgagattcttctcagctggacagtggaaaaagctaccctagtgtaggattttattaatttgaaccttgaaaggtaaaaagggatggatgaaaagaaagagaaaatatatttcaaataaaaagtgcctgatgatgaaagggtgggacactattggtctcattggagttgaggaggagatcattatgtcagaagaaaaaatgtgtattgagaatgggaaataacattaaaaataatggtggtcactctgttgaaggggctcctacataacatttaataatttagtgatttcccacagtgcaaggcctgggatgctattgtctctactgttctatcttccttctccactagctatttcttacagggacattctgtcatggtgagctcagggcctgcttgtccttctgattacaccagtcataacaaagagtagaccaggcttttccatccaacacactcatcaaagtccattacactgaactttgacatagcaatgcaaatagagacgaaaaacaacaataaaaacaataaaattctagtaaaaagccaaagataaattgctcttaagcacctactctggttattctaaaatgcttcccaatgtttctttaaactataagttcttagaattagggaaaaagcagtttttggtttaaaagattttagactcccaaagaaatgtgtaagcctcattttagaagtttcgagtagatgtttgcacctaatttaatgtgctaacccagtctaatgaattgagtatttccccaactcagtgcttggcttttggatgatgaagtggcttaaaatcatgaccttgagaagttctattccatcagatcaggccctacttataaacttcttaaagttggcatttgatacatggagctattgtgagctgtgctgtgacaacatctttggatggttttttaaattgtagagtcctaaaaactggcttggtcaccaaagcaatacaaatgctgtccttatgtgtatacgaaatccttatgcttgcctcactttgttttaaaggcacctaatagtattctgcttaatacttaacagtttgacagaaaagttcatttcaatcctataaatcaatgacctttctaattacaaatattcactgattctgtaaacaatgacaaactttcatttgaataacattttatagtacatttttctatgaaatgtgaagtgctttcaaaaggttgccttatgccatggtaataaaaacgttttagagcatgtgcgttgtcaaaagtcactaaggtatgttctttgtagaaaagcacacagctgagagtttacagtggataggactctgccctatcccacccacacatctaggtttcaggctgtgtctgtctggagaaatgtgtcagtgcttacctatatctctttggcactccaatctcatggaagccagtctgctggcttccaactgcaaatacctgtgactctttgcccaagggtcatctttccctgttacagcccatttagcccaggcaagaaaagccaggaatttaatatctcccaccttcccatgagtggctttcaacccatgatcaatagggatgattcctgcatgcctcagctcccctgaccagcagtgagataacgccaagatattttctacactgtctcccagagcttcccagtaagattgcactcgcgttgcccacagtggttacgtgctgaacaatgcatccttattgactcccttctctatctcacttttcaatgtccctactggtaattcccaggatcacttcccaaataaaccatttatacttaaatctgtgtctttggggtctgtctctggggaaatccaactcaggacatactgagactgattcccacaaaggcacagtgtgggttagctgcagatgttgggatctgagaagctgaagaactggatagaatgggcaatgatgtagaaccactgtaggcttctgaacaagagaagggcgtgttgttaaaggaaaatgatcctcgcttttgtctacagttcactttgcatcaaggggaggggtgtggctgggaagagcctggagcctagggaatcgagttttatcactattgttatggttatctaggggcaggtaaagagaggttggattagtggagaggaggttaaaatgaaaataaggaatatttcttttttttttttttgagatggagtttcactctttttgcccaggctggagtgcaatggcacgatctcggctcaccacaacctccgcctcctgggttcaagtgattctcctgcctcagcctcctgagtagctgggattacaggcatgtgccaccacgcccagctaattttgtatatttagtagagacggggtttctccatgttggtaaggctggtctcaaactcctgacctcaggtgatctgcccacctcggcctcccagagtgctgggattacaggtgtgagccaccgcatctggccaaaaatacggaatgtttctaaggtacatgatggagaatcagtgaggattgatgttgactgagttggtaatggaggagcaaagaggagggaggaagcaaaaataacagtcttggagaactgggagtatggcagtgcccttagcggttttgatctatgtctaatttgtagcctctgcttacagggtaatatttattggtcttgagaatttcctgaagcaaccttacagttcatcagaatagggctcatttctccaaaagaacagaccctgtgaaacctctggagatatagtcagtatttcatatgagtttatggatttttcttcagccttccaatacatataaaattacttatctctcttttctctgcactgaaatcctccaacatgccttttccctgagtgaataaaaaacacgagcttttcttaacaatagaccttctaatgagtgagcagagccacatttttagtatgtccaagtcagaatctgtttaacaattggtggccgtctctcaacattgcagctagtgacagcctcatttacactggttcaatgaagatactgaaatgttctcggccagacagtggaagtgaacttacactttcaccagtcctcacttagcacagattttcaagccacttaacacctttcaagtgtctgaaagctaatagaatgctcaacacaaggctcccctgacttttacagctgcccagaatttttatttattatatgtctgtgattatttatttatttttgctaagaagaaaacagagtgatcttacacactgataactgaggaagcatttcacagctggaccttatgtttttttttcaaagaacagagttctctgagctctaaacaaaacttcttatcagacaattaccaatatattttactattttaattttgcttttcagcttattgattaaatattcagtgtggaggaatgggcattcagccttaaaatgatgtaattttgttacatatgaaaacagcaaaggacaatatgtcactatttgaatgagccaggtgaaaagaaactctatgaccttaattcggccatgtggataaggggttctaaaaaattgaaaggagacgtttaggaaaatttgctgaaagaccaaaagaacaataatttcctagggtgataggtttgagctattttctctccaccctagaaatgagccaaagatgtatttacccactgaccccaagaaaatggctgatctccagttggaggagacgaggatctttgcttggccttgttttatggatggaatttttaatattccgtccatacaaacctatgcatgtatttccagaacatttgtgatgaaaaggaaaaattatgttcaccttgataaggtttcttaatattatctcttccactggagaatccagctgattacactgacttccaccaataaccaagctccaactacgacataggtcccaggagtcttaggtagagcaggcaggtggatgaagttggcttgagaattttagtgaccaaaacatggccttcgttaggctatgattttggtgactgaaaaaataataaggctgtggatcattatgtgggccatcagggaagtttcaaagaaagaaccatcttctgaattcattgtgggtcgtattttgtcaccttcttcctactttagtacatacacacacacttctccaagttagaagattcgagttgaagatataagcctgcactatctaattcagttcccacaagccacgtttgtccattgagcaatgggaatgtggtgagtgcagactgaggggtgttgtaaaagacactgtgaatttcaaaaacgtaatggcaagaaaagaaggtaaattagctcattaataattttttatattgattgtaagttgaaatgataatgtttggatatattgagttaaataaatataaaattaatttcaaatttctttttatttcttaatgtggctatcagaagattttaattacatatgttgccaacataatatttctatcagaaagttctggaaataagggacctaagtgcatgtaagggaggagaccaccccttatattgtcttatgcccaatttctgcctccaaagaaagaagaagtaaaaactaaaaggcagaagtgaaatccacaagcagacagcctggcgccacaccctgggccttgtagttaaagatcgacccctgacctaatcagttatttgcataaaaaagcactgtgaggatccctgtcctgttctgttctgttctaattaccggtgtgtgcatcccccagtcacgtaccccctccttgctcaattgatcacaaccctgtcacgcggacccccttagagttgtgagcccttaaaagggacaggaattgcttactcggggagctcggctcttgagacaggagtcttgccgatgctcccggccgaataaaccccttccttctttaactcggtgtctgaggggttttggctgtggctcttcctgctacacatggactgattttcctcttcttcattactttggaaaataaagaaactgaacttcttacttgtaattcatctgttcacccctttaattcacctaacaacattgtacctatgaatctgatataaaatgatgcccataaacccatataattaataaggccagctacttagaaatgttagttcataaattaaatagctttacatatgtttttgaattctacatgcatacacaaaatgattaagaaggtatttattttcttataaattatgaaaattcatatatttcaacttactattttacttataaaagtatgttctattattttattatttgtgtctgttttttccactaaatttgtttcattaataagctaggtttttaaaaacacaattatcatttgacagatgctaaatatctgatttaaatgatacataataagaaataaaggatctagtctcaaagtaaataatactaatttgtaaaagcatctttgtgacatttcagtaatatataataaaactgtattttttaatcaattaggaggctcatattccaatatccctaccctaacacattggcttgggtagaagaattagttggtgagaacagagtcgttgaacaaacagtgactagccatttcccatttaagttgggaactcttaaaatatataaaccattatcctaactatggaaatataaggacatatgcacaaagcatatgtcctctacttccaagaaagcataatatagtagagtggagaaacagagatcactaagccgacaagaactatcactcttatccagatcaatgtactctttttctacatagcagccattttctatgtagcagtcatcatgattttgttaaaataatcatattttatccctcccacttctaccttttaaaatcccaaagtagattttcagtgcacttataataaaatcttaccataacctgcaagacactgcatgatgtgacctctgttgccttttccatttcactccctgtcccctctacccttcacactcaactctccagctgactgatgcctccaggtctttgcctctggtatccctcatcttagtctatttgtgttgctataaagtaatacctgagtgtgagtaatttacaaagaaaagaaatttattagctcacggttctgcaggctgtacaagaagcacggcttcagcatctgcttctaggaggacctcaggctgcttctactcactgcagaaggcaaaagagagccaatgtgtgcaaagattacatgacaaaaggagaagctagagctagtatgtggggaggtgccaggctcttttaaaacaaccaactctcacaggaactaatggagtgagaacccagttgttacaatgagaatgacaccaagccatccatgaagggtctgcccctctgacccaaacacctcccgttaggccccacctctaacattggagaccaaatttcaacatgaaatttggaaaggtcaagcatcaacctattgcatcccctttgcctggaactctctcttaaagcttaagaataatggaaaatacagggagagtcagtcttgtgggcacatctgagttgccttctctggccaccctatctttttttttttttttattatactttaagttttagggtacatgtgcacaacgtgcaggtttgttacatatgtatacatgtgccatgttggtgtactgcacccattaactcgtcatttagcattaggtatatctcctaatgctgtccctcccccctccccccaccccacaacagtgccgggagtgtgatgttccccttcctgtgtccatgtgttctcattgttcaattcccacctatgagtgagaacatgtggtgtttggttttttgtccttgcgatagtttgctgagaatgatggtttccagtttcatccatgtccctacaaaggatatgaactcatcattttttatggctgcatagtattccatggtgtatatgtgccacattttcttaatccagtctatcattgttggacatttgggttggttccaagtctttgctattgtgaatagtgccacaataaacatacatgtgcatgtgtctttatagcagcatgatttatagtcctttgggtatatacccagtaatgggatggctgggtcaaatggtatttctagttctagatccctgaggaatcgccacactgacttccacaatggttgaactagtttacagtcccaccaacagtgtaaaagtgttcctgtttctccacatcaaggtaatttatagattcaatgccatccccatcaagctaccaatgactgtcttcacagaattggaaaaaactactttaaagttcatatggcaccaaaaaagagcccgcattgccaagtcaatcctaagccaaaagaacgaagctggaggcatcacgctacctgacttcaaactgtactacaaggctacagtaaccaaaacagcatggtactggtaccaaaacagtgatatagaccaatggaacagaacagtgccctcagaaataatgccgcatatctacaactatctgatctttgacaaacctgacaaaaacaagcaatggggaaaggattccctatttaataaatggtgctgggaaaactggctagccatatgtagaaagctgaaactggatcccttccttacaccttatacaaaaatcaattcaagatggattaaagacttaaacgttagacctaaaaccataaaaaccctagaagaaaacctaggcattaccattcaggacataggcatgggcaaggacttcatgtctaaaacaccaaaagcaatggcaacaaaagccaaaattgacaaatgggatctaattaaactaaagagcttctacacagcaaaagaaactgccatcagagtgaacaggcaacccacaaaatgggagaaaattttcacaacctactcatctgacaaagggctaatatccagaatctacaatgaactcaaacaaatttacaagaaaaaaacaaacaaccccatcaaaaagtgggcaaaggatatgaacagacacttctcaaaagaagacatttatgcagccaaaaaacacatgaaaaaatgctcatcatcactggccatcagagaaatgcaaatcaaaaccacaatgagataccatctcacaccagttagaatggcaatcattaaaaagtcaggaaacaacaggtgctggccaccctatcttaagtagctcccctgtattcctgacagtgaccttgtatctcactttcctatttaattttctttatattgctaacaactaccccaaattatcttttactttaaatttacctagttatttgttgtctatcccttttcatagaattaagaacacaagcctgatctcttttatttgatcttttttttttccccagacatatcaaaggccctcaataattaaatgctggctgactggatgggtgaatggataagatagtttcataagtgtaaaggcagagagaattcagagtaggggaggaaatagagatggtatctaatccagattagaagttttctgaaggatatagtacgtcagctggtacatatgaataagcgggaagtggccaggcaatcagcaaagggtttaaacttctgggcaaaagagcaagagtctggtggctaaaaagaggctgtcatgctcagagaactactaaaagttgagtcaagctgcagtaagaagtgggagtaatgctgagacctgaggacaggtagccaggaaggagcccaccagttcataagaggcaactgcatgagaagcctgatttggatggtattgtaaccccaaatgtctgaacgttctgcaatatgaagcatgctttgcatgtcagcttgcttactccagctcagtgtttaagctgcttatgagattgtaaactgaacaaaatcagggccgtcccccaccccttggattcttctttacttataacacaatgccttatacaaggtgggcttccagcaaatgcctattgagttgaattgagtcctttctcttattatttttcacactgttatctgaactgatatttggggctgtctagactattctgagatatcacacaaagtgcaagaataactcatgctccattgatcctccataatagttactttgaataaatatggaggacggacatgcacaataaactgacatgctccacagcttttgactatggaagaataccatactgacaataaagaaggcccggaagggagctttcagagatgtggataagatatttctcccccttgagttgaaacaggaaaagggaatccagttcttggtatattggatttaaaaaaaaaaaaaatacactcgtctcaaaagtctgcatccttgcaagaattatcaattctgaaatgcctgttcattttccacagattagtcttcattagacacaattttagctaggtattcaattgcatttgtttgagtaggtaagtagaaaccaagtctcagtgatcagaattttagtacagagctaacttaagttgtttgcttttgtctcttcaacgttagaaggacaaatggtgccttgattttacaccacttcataaataattttctagagccacattttttacaacagactgaaacaaacaggcctagatctggttctgattattatgacagagaaatgtgaatacaatagagaaatgacatattaatcatagtgatgtttgatatgctcacttggaatgtgaactaacaggttcaggtaccccagaaatatctcaaagacttcttttatagggctgattccccccttattatggaaagctatatttttcctatatattttattaattccctatgtctttatttcagtgtagaacatattcctttaatcattagcatgcaccaacccctccccaaaaaaagcacaagctaaagcaaatttatagaaacccaacttgaattctaactcagcaactcaaaaccattggacatttctaaattttttatgtaaccatgacttcatctgaaattctgttgcttacacgtcttgctacttcttaagctcacttttctaaaatgatgaatgctcatataaaaggcaaaacaaggcagccctgtagagacatgttaagtctacaagtcaattgatttcctatgagaaacttttgagctagggaagcagggactcaggaaagttttgtttcttgttagatgccagctgaatagaattaaatatattgtcacaccttgaatattaaaatatcctggctggatgcagtggctcacacttataatcatagcattttgggagcctgaggcaagaggatcacttgagctcatgagttcaagaccagcatgggaaacatagtgagatcttgtctctataaaaaatattaaaaattagccaggcatggtggcacatgcttgtgatcccagctacccaggaggctgaggtaggaggatcacttgagcccaggagttcaaggcttcagtgagcagtgactgggccactgcacttcagcctgggagacagagggagagatccccgtctcaaaacaacaacaacacaatatcttgaacttcagatgttttaatagagacagtgtgatacatgtgtacatagggaagaaactagcccacggagttcactattacataaaacagcatggtttacctaccattgcttttattaaaagtttttgtttttccatgttcatgttgtttttggaaatatattgtaaagtaatattgtcaagtaaataattttctcaagggaaaaataacaattagaaaagaggtaagacccctttgctctgatacccttaaccaagttaattgaggagagaagtagaaataggaagagaagaagagaggaaggacagaaaaaaagaaaatatatgagggtaaaataacatcactgcaggagatgttgcccgtgccctgttcacattggaccttaacactttactatgctccacacaatttttagcttccagtatctgcaactctgttgcaggggttcttttccattatagtggaaaccttcctggtcagcagaagactactctgcacatggcaggctgccagtgacaagaaattaacatcccttaaaacctttccctcaatcagtgattctctagtgtatcaataccccagctcccctcctcttggctgccataattctaagctttctcttatacaccacatctcagagcttctctgtagcagtaagctccagtgacccattgtagtagctggcttaataattcacccattattgattgctttgcctctctgtgttacttcaccactctttccatgctccctgggatcacctcctaaataaaccatttgaacttatatcctagtcttaacactatgcccctggtggaacacaaataagataactactatttctgttcataacagtttgtccttggactccattcattagaattgtaatggcttctattattaagacctgtacaaactttttcatgatactgcacttacctgggttatgcattctccctgctttcttcaatatccatcacaggtgtttcataaatattttctgagtgtagactaattccaccagtgcaaagcttttgctacagcacagttctggcacacagtctgtgcttactaaatgttttatcagatgaagtgtgatgattatgcctttggcagtggaaaggtctttattcaacttttaattatgtccagaagaatggcagaatatgtagtgtttgcaaccatctggttgaaatccacctgcttacacaggtatttcagggcagagggggtactttatccatcttagcatctgggaataatttatcatagaggccaacttgcaaaatcagtcactctggatgcctcatccctttcaaatgaaaaggatttggcttcaagtgctggacatggaaactgagaatgcagtgactcatttctttaaaaatgtgaatatgagagaggaagatttttatcactcaaagtgcagcacggtgagagctcgcctgagttaggtaaaatgcacataacttattttatggacacctctctaaagtgccttaaagcttaaaggataaagaacccagtgggttttcgttttgttatatgccccaaggctgaaactctgtggcatattttaacagagtttttaaatggcaaaacaatagttctttttttttttaatgtagtctaaaataaaatggaactccagacctgtgtgcgacagctggtgttcatatgacactgttagatgcctccttttatcccaatctcagtctcccttgggtagacaagaaatgggagagaatagtcaaaagtaagaaacacttctacttgagtgacatcttcctgatcgtagcagaatgaaatattatgacagttgtccaggtagttctaagttttgaaattttttactaaaatattcagatataatggaagcaaggacttcctggaaaaattatctcctcaattatcttttttaagttgaagttatatgagtctgacttttagacttctagtcaaattatgcaacttttcttcttctgccagtcagcttgttgccactgataagtaaaatgggattctagaagttaacagggtttgagtttttttccatgatgttgattattagatttcaaaacttttaaatcttaagtttatttacataattagtcaattgtaacctgaatatctgaggagttattaatgtgtcaagctgacattatttaatcatcagaaaagctatctttccttccccagtccatctctccgtctccctctgcgtgtgtgtgtttgtgtgtgtgtatctctttctgtctctgtctctctctacatatattcattatatgtatataatacatatacatcacatatatgatcctatttggcctgacatactatacccataggactaacttaagtaatatgagaagagtgagaagagttcatggtaggaaggtcaatgaattgatatattgcaaattatctggtagataatgcagctgcttcttccacttagcaaataatgttttctgtaagtgttctgtgatcaagacatagcctgcaatgacttttgtatgctaggtcaactccatcgaacccccaaattgtactggaatcagactttttcattaattcatgcaaaccagcctgaattctactggcaaccatgaaacacttacctatccatacatggcatagtcttcgaattctcatttgtttctgattttaaccaaaaaaaaaatagattttcatcatttacaagccatagcaatacacgttgcagtcactaagctaaactcattacatgcaagtagattaatcattcatagaccttatagcttatcaaaagaccttgataactcccacggcttcttccttctgctccttcgatatttgacaagcaaacttatatctgatactgatagatgatcaaccctcttgttagtttgaccccaggcagcaggacttcattagctccagtctgtactaggcattacgatggtaagtccagatgcaaagaaaggatatagcaggatccctgtctcccatgtacttatggccttgctggagaaagaggactttaacctgtaaaagaccaagacaattttgtgaaaacagatagaaactctggtagtgataaattgataaaccctgatggtagagactttgtctaatggcttaaatgaggtgccatgttcgtgccagcgagaattcaatacctacttgtccacgcacaaaaaaaaacgatgctcgttacctgatctcatggagttcaatgagagcggaggctaagcctttgtaagttctcaagattcttctcacaagttgtgggctcaattaacatgtcttgttatagaacttttattggttggtgtttgatctggttatccatactgtacacaaaagtcgctgtcagctgaagagggaatgcttcaagtactcagttttctcttaaatcaaagcaaagataaacttcttataattatttttctgcaaaccaatttataaagcgcactcatcccaataataagtgacaagaaagaaagagataggctgtgtttatttgaaatatcctactattcctctgatacagcactgttgttagattcctttaggaaatattagaatctttctcacaattgatcagcctccctgaatgtgcccaccaaaaaattagttcttcagagcagattttgtattggcagtttgctaaacacgatactttcttctgaaactcacttatgcaagcttgaatggtatctaatgagttcataccaaactatgcccaaaatgaaatccaagcctcatttctgacataccattgttcaccatgcccgatatcttactaagttctgttaatttttctttcctaatgcctctcacaactgtttcttctcttaatccctggtgccagtatcttaggttagaccaccaccatatctctcctggatcaccaccacacccttctaatctctctgtctatatttttgccaccatcctcctctccatctcaccctttaaagtccagatgaaggttttaaattgcaattttaattgggttctttcctccctaattagtttcagaataaagcgtaggtgcatcctcagtgtggcctggcctggccctgcccttccttcagccttacttcttgtcattttattatttgaatgccagttacctactggaccacttcttgttcccccaaaagctatgctttctttttcctcgaggattttcatagcagggtctcttctctgctcttccttcatgccttggggaacccttgctcattgttcaggactcagcttacatgttttgtcccaccctgtggtggcttttcctggtccctcaaggctgttgctggaaaggggtcccaacctagaccccaagagagggttcttggaccttcctcaaggaagaattcagggagagtccaaagagtaaagtgaaagccagtttattaagaaagtaaaggaataaaaaaatggctactccatcagcagagcagtggcatgggctgctcgactgagtatacttatagttcttttttgattgtatgctaaacaaattgtgaattattcgtgagtttcctgggaaaagggtgggcaattcccagaaccgagggttcctcccccttttagaccatctagggtaacttccagaagttgccatggcatttgtaaactgtcatggcactgatgaaagtgtcttttaggatgctaatgtattcgaattagtgtataatgagcaatgaggacaaccaggggtcactttcactgccaccttggttttggctggtttgggccagtttctttaccacaacctgttttatcagcaagatctttatgacccctatcttgtgctgacctcttatctcatcctgtgatttagaatgccttaacctcctggggatgcagcccagcaggtctcagcctcattttacccagtctctattcaggatgaagtcactctggttgaaactcctctgaaaagactggctttagtatcctgctgatatgctcctggagccagtgccctgtgctaatagattctatcacagcactgaccacgctctaatgatagcaattgttaacttgtttgtttctctcaccaagaagtcacgaactgtggctttttttggttatgcattccctgcagctggtactatgtgccagttcagcaaatatttgcttgacaaatgaagtcaaagccgtgaagttattacacaactagtaattggagaagcagggattcaaaagcaagctctttgataccatgtgacgcaacaatctctctgccaggtatatgcccaaagtagatgaaatcactaccttgtaaagatatctgcattttcatgttcattgcagcattatttgcaatagctgggttctgaaaacaacctgtaaattgatggatgaatgcacaaagaaaatgtggtgtaaatctgtatctatatatttatatatataaaaatatatatatttatatatacaaacatatataaatatttacatagtatagagagatatcaatatatattttatatataagtatataaatatatatacttatatataaatataaatatataagtatataattatataaatgtatataaataaataaatataaatatagataacatatataaaatatttatatatatttatataaatataaataagtatataattatataaatatatataaatatataagtatataaatatatagttatattgatatataaatatatatctatatcgatatatttatatgtcaatataggtacataaacatatatataaaatatacacacacaatggaatattatttagccttaaaatggaaggagatcctgccatttaccacaaaatagatgggcatgaaggacatttatgttaagcaaaataggccagatgcagaagataaattattgcataatctcacttatatgtgcaatctaaaaaaaagttcagatattcagagagagataataaagctatccaggggttgggaagagggggaggaaatggagagatataggtcaacagatacaaagtggcagatatatagaatgaacaactccagagactgaatatacagcatgaaggctacagctaataaaattgaattttggatttttgttaaataagtagatttttgttattctcaccccaataaaaaagaactgtgtgagatgatagatatgttaaatggcttcactgtagtacctattttactatctatatgtatcccataatatcatgttgcaaatcttaaatatacacaatagattttttttttaagcagctctttaaacctcaactataccatgctctatatcctaggagaagcgacactgtgtgctgaagcatgaatgggtacagttaaagtctttccattagccatcctccacccctctgcccgtcttttttctttttggcaggagtagggggtgggggcgaggacagggtcttgctctgttacccaggctgaagtgtagtggcacagtctcactgcagcctcaacctcccaggctcgagtggtcctcccgcctcagccccttgagtatttgggactacaggagcacaccaccacacccagctaatttttattatttttggtagagacagggtctcaccatgttgcctaggctggtctcgaactcctgggctcaagcgatccttcctccttggcctctcaaagtgctgggattacagtcatgaaccactgtgcctgggcccttctgccagtttttagtacagtagtttgaatatttttagaagatgggctgtgtgtctaactaaaacctaatcgagtgatttatgctaaaattgtacctattctcaatggcctgtcagaactgggaataagccctttaaaataaaatcagctttgatatatattttcttaaatgtgttcactgctatcttttctctgcctgagaattctgctaagaaaacctcccagcaaggatagcttgttttaagttttttatagtttctcccattgtcttttcattgtctctgtcactccttaagatgtcatctgagctttattaatatgtatttggtaatttgtattcatgctatatcaacatgagaaataaaagagtctctcagttttagacttcagagccccaagtcgcctgaatatatagccacctaaatatgttgtactcagcattgggactaagcccctgctgttcacattacacaatggagcacctttctgagaggctagcatttacctctccagacatgtgtgccatcaaatagatccacagacacagatccttggtcatactgcaaatatcttctctgtggtttgcctttttattctcttagtagtgtcttaatgaccataaattcttaattttaataaaattcagttcttctcctttatagttacttcgtgtatatatttccttaaagcattgcttgtcttcatattaagttgtacaatattttgtgtaaattattttaaaacatttcttcattttactattttatttaaaatgtagtttctaaatatccagcaattttcctcctttgttttataagtccctcactccgcaggacatattacaaattacttggttgtaatttgtatttctatttaatatttattataaattattagatattttaaaatttagttttgaagacaagaaagtatattgggtgctaataatacatttctgaccctgacatcaccatgatagctttgcattaaatacagtctgggccggatttggaaatgctaacttttagttttcttattgaaataaattgtatatacttgcatgtacagtcaaccctctgaatctgtgggctccatgtctgtagattcaactaaccttggattgaaaatgttcaaaaaatggatagtgtgtccgtattgaccatgtacacgcatctttcttgtcattattctctgaacaatacagtataacaactatttacattgtattaggtactataagtactctagggatgatttaaagtaacaggaggatgtgcatagattatatgcaaatagtatgccatttttaataagaggatggagcattgtggcttttgggatccaagggggtcttagtcttagaaccagtcccctgtggataccgagggacgactgtataccatatgaagagtgtgaaaactgcattattttataggactgcatctttcaatgtaatgtcaggacttgaactgtgcaacagttaggacactcaatctagagccctggaaagtacatgaactacattgaaattctgtcaaataattattatgcgattgctgtttcacttttagtcaagaagcattgaaaaaacaagtagcctcattaatcattgaaaacatcagaatgaactttgaggatcaggaatttagggacatgcagatctggtcaattggccattataatgatacaaattaaagcaaagtccagcagggaaaataatccagcttgaatcctgggatctattcttgtacctttgtggcgtacacttaccagacaacagatctaaaatgtggtgtgtatgttttacaatactatattaatataaactatattaatagtctctaagccaaatgatatgtgatacatcctaaacttttgtttgaatagttgaatttttctttattgttttcatggatagttaatgaaatagttatgataaaatataccatgtttgaagtcataacttaattacatttattaacaagaaatagtaatgtacaggaatgaaactgaaagttattgtgcaatttactattatcttttatggatagaactggttacaagtaacaaatgtaaatttttacatttgcatgtaagaagataagtcctaacagcattattgaatgataacattattgaaataactttaatttcactaaattgatccacatttgctatttatatagagagaagaccaactgtgatttttatatacatatttgaaattatccatcaatatcacatggaatattcaatctggccttttgcgggaggaagaaaggaagagattttagagactaggaaaggacagcaaattaggaaagaaaaccgcagatacagcagataagggaggaagaggtggattatctacctcagtgacaatttacatgctgaattatactaatttccctgtgttctgtgatgctcagtaaatgagactctgctgatgttcctataggccatgaaccagccggcacgttggtttccactacaacacctacaaataaactgctgagttaaaatctattatagcagagaatggcttatgacccacagacaatcattcctcttctaaatatattcacaaatgcctcataaatgtttgcttgggcattttatttagaagcaacatggataaatatttgaaagagtattgctaatgacaaagcaaaagtgaactataaaatagctttaacgatgactttaaaatctgcacttttcaaatcaagcactcactaaggaaagacaggaaaatataagatagcagcaggtgagctcttcgtgtgtgtgtgtgtgtgtgtgtgtgtgtgtgtgtgtgtgtgtgtgtctatagctgtctatgcgaagcaaatcatatttgcaaaataagaccaatatctgctgaatagaaaagagctgcattgaacagacatatctgccagaaaaatctggggttgtaatttaggttttatagtccaagaatgactagattgcttttaaaagcactacttcttcaatgcttttattccattctttgatcaaacatgtcagccaaggaagaaatggtcatttatttcttttgaaagcaggaaaaaaagagatttacattaaatagcggtcatcacggcgttcgtaagtttccaactatttatcaacatgcttggttcgcaactgcaattcacttaattggacttgcatcttcagtaacactgcagcttccatactggaggtggtagagttattctaagccatgggcaggctggtcaaatgtacatatggctgtgtaattgtcagaaaatgtcctcgtgtcagacggggccatggcttatagtgaaaacaatcctgttagtgcttctgcagcatatgaggagacagctccactttattagtgaaattacactggccatggatgactggctgtcttgatcatttacaggccaattgtgaagccactgatgaaatcactgggcagcccaatccaattcagtcattaagacaactggagtaaccagactgtaaaatggttggtctggttatttcttaatgatgtaattggatagaccagagggagatccaattaattgctgagcaattggtggctatggtggtctcactgataagctcagctgtcagtgatggacttgaattgactgtacagcttcctgatcaattgtacaagttactcttaccaagctgggggttggggagaattgatttaattttggtgatttcattgagcccactgataaatcacatatcttaagtgtctctctctctctctctctgtgtgcgtgtgtgtgtttgtgtatgtgaatgtgtgtgttattttctcaattgcaatatatttgtgagatatcagtgatatataatgctattttaagatatggttattttaccttgccagtgtatatttcattggaaaagtctataggctcttgtagagatctgtagggcaatttgttactttctagaataggaggggaaatgcaagcttgaatgaaaattatgtgtttagaaggcgggaaagcaaagtattttttcttcaccctttatgcccagtctgtgaagttcactgcatggttactgcagcctattcatgacatagtgatgctagatattcttctgctttgctgagtggcctgtgaaaagagcttaacaccagtgtagcctggcatgaggaagtaaatgattggtataatattttggggaacaaatatgcagccgatgagtatttcagctctcccccacccattaagagacactgtccatggaaatatcccttcaaagaaaagacttagttactcatgcaagctcttcttggccagggcctgtgtgaggacttaattcactatatccaccactcaaccatgcctggaatagacgctcattaatgtttgttgatttagtgaaggaatatgttcttaagataaatttctttctgagagttgatgccaaataagtataaaaaggtacataactgtggagtttttacttattctaagaaaataaataaatttatgagttggaagtgtgacttgttgaggtgatttaggccacctgtgatttttctaatgatggtccattgacaagtgccaatctttgacaatgttctcaccaggccaaagcacaatgagaaaaacataagaataatggttttgagagattaaaaatgtctgcaaattttttgtcatgccccccactgaaaggtggcatctctttccttttctcttaaatctgggcagcccttgtgactactgaaccaggttaagcctaaactttagggggactagaagcttctgcctcctatgttgaatgcttgctcttgagacactcccttccaggacacaggcatcatactatgaaaagctcaagccacatggcaaagccacacatagatgctctggtccaaggctgaagctgatctcccagccaatgccagctgacttacattgagacccattgagacccaagctgaactcagtccacccatccaattgtagacatgataaaatggtttttttttgttgttggtttttttttttcgagacagagcctcgctctgttgcccaggttggagtacagtggcccaatcttggctcactgcaagctccgcctcctgggttcaagccagataaaatggttttttaaagccactacatttcaggtcaagttgttcccagcaatagatagatactaatgatatgtattgaatatatactacaacaatgatgcatattctcctttgtaagaattgtcacctctgattttctgaggattagctattcagagacgctgtagttcttgctttcttggtgttggaatatcctttctttttggcatgatggctagagaagatatcagtgatgtatgtagatgtatgtttttaactggaataagaaaaagttgagattcatgaagagcagtcaatgttttcagcacccttcatttatctataaaattcaaattctctgcccaaatccaacttcacaccctctgcaggaattccccctcatccagggccatcctgaagattaccaaacttctgctcaacctattccagtggaaacaactgattcatcagaaggcagtgctgtctgcctttaaacatctgtgattataaagaaatacagtaatataaaactttgatcataaagagaagttttgcacagatatttgtaattcttaatttaaagaaatattccgatattgttaattacacacaccaacacatttgcaaggaatctctggacttcagatacctcacttcaaattgtattatttcacattattgttgttgtctctgataagggaatacgcatgggggatgggaagtggcagtgggaggtgttggggagggaaaggtgaaaaaacaccacatttactgaaaacatactatgtgctaagttctactgcatatgccagactctcaagaacttggaggttttagaagttctttaatgcagacatttccataaagatgtatgttttccctacaaatcaaacattttatgaataaacattatttaactcaaagctttttttaagcttttgaatggagaagaagtctcatctaccttgaaacattattgctatgaaattattttattccaaagtcaatggatttgttttttacaaaaagcttaagtaaaggcactcctgaacacaaattcttttatcaaactacttttgtcacaaaggtgtttagtataatgcgttataaattatatgagtgcaaaatatgaagaggaaaatgtgtctgtacaatggacattaggaaaaatataagtaacaaaataatgtgacgtgaagcttatctttgaaatgatacggcatttacttctaccatatgtgtttgctacggtccttctaaagttctcagcatttttaataacaaaaaatgtggctgacatatgaactttagctcttacagcattaacatattccagtactagtgaacagttaaaggaataataagtgaaataaggtgtgtttgtcattattagtgagaatatggagccctgaattatggtaaatagtgaactaattgccttaaaaatggtagaacttttcttttgggtagctgtttcttgaaagccattttcttccttagaaactgttttcaaaaactgccatcttcctcacagatataaccttcattccagcagtcattggtctataacaaagcttttcaaagataagaagaaaaactatggtagtacttcagtgaatgtcacttgactgcagactcatttttctaatttttcagaataaagatatccatgatttatacccaattcaagaggagactttggatcatttcaataaatattaagggagattatgtatataagatattatttagataaaaggattattaaatacctcagataccttttcctatgacacacctgttaaagaaacaaaatattctgtacaagtctactcttcataggaaataagatgaaaattgcaagaagtttcttcaaaacccacctgatgttctttgaaataagatgaaaattgcaagaagtttcttcaaaacctacctgacattctttgaaatggaagaaaaaaatgctatgtttacgtacatacctttagaagaagaataaatattattctccttgtccgttgcctttccctcttttgtttatagggatggggttgaggggggactttgggagaggtctccagaattaatgaatggaatcaatcatctagaaagttatcagcatgaactaaactcttaacagcagactgtggaggtgctgactacctttcatgctaattgactgccaaggcaccctaactagccatttgcatagggcattgtggtagatgtggctctgaaatgtgcatctccacagcaatggagcaagttcacctgcctgaagaattgacagagttgctagcccagaatgcatggcttctggagacttctcaggaatttcagctggatggtccagctcacttatcatactaataccaggttagaacagttaccttagaatctttgtacattaccagagaaaatctagaagtacaatgcttcagttagacaggaggaataagttctggaggtctattgtacagaatgatggctgtaattaataatgtgttgtgtatttggaaattgctaagagagtagattgaaatattcttatcacaaaaatgataaggatatgaggtgatgaatattagttagcttgattcaatcattccacaatgtatacatatatcaaaacatcacattgtataccataaatgtatctttctcatttatcagtttaataaaatatggataaaacttagtttggggacaagtagggtcatttcacattgccttggtttctttttggtgataagtgtttacaacatatatgaaagtagaaaaaagtttgatggccaaatttaaacttacctctcatatgttccagaaacaccactgcctcccctcaaaatgatcagattctactctacttccgttcaaaggtacaaggtaacaaatatactgacatttgctcttgaagggaagaaaatcagatttctgccaatttaaagccatgaacaaatgtcagaattaagatcagtttgttggatgagtttgtaattccacatgcaaaagctaaaatattttcacggtggattttactgtcctatgtggcaatgcacccatgagtagattgggttcactgggtacattccaaagggccatctaaaatgtgttttctggttttcgtcattacatgttaagtttttgaacactagtggtcatatattacctgtgttcagcaacacgctgcttatactgttgttgaaaaactggttaacatttagtaggcacttaaatatctattgaataaatagtggggatgcatgactgcattacatgctttaatctcaggacatcctttaagttcagaaataatcctatgagctgtgattgttcaatggtttgtaaataccataattttttagagaagattgttattttaaaatgttggtgtttcacctgcctgttatttacaaacaattcttttcaatgatgttcaataattattcaattaaaaattaccttttgccccagtcagtatttaggtggagtagattgttctggtatttatctgattattatcggaaaaaaaaaactgaagttgaactggtgtcagagtggatatatatttacaggaaaaggatattactgttcctcaaaaagcattcctagaactttgcctatgctgcttgaagctattgcttaacagtttcttcccatcttatactcagattttaccatgtcccttagctgtaaggttttctccttctctcctatcccaggaaatccattgcagcaacttatcagtagaacacatcgtattccgtgttgtctcaccagttgatggtttaattagcacctagttacaaactaagtagaatcattcatggaaaacatggatctaaaaacaaaacacaaatcattcatccaggccgtagatactataaactacgtgtaatgacaactgtgatctcctggtcccaccccttgaccagcaagctgtcctgaagatgctgtttgaagattctcaagtaggctccagttggttccttcattcaaaggcccaaattatggggagctcatctttgatcctctttaagttctacattcaataaacttattcattcattcattatttgttttactcattcaaaaagcatatgaagtgccagagacacagagaaagcattctccacagtcacactcttaagttcctttgggtgagggtggcaagcagtggacataacaggtgaatgaaaaattgcaaaacaatatgataagtgttacagctgagctatacaagggcaatgtgagcatacagaagggatttaactaactcagcctagaggagcatggttaaagcaggagttgaatctggaaggaagaaattttgaaggaaggatgaagaaaaagactttgcagactcaaggaataggatgcacacagctgcaaggcaaaatgatggcatgttccagagtctgcaggcaggtgtgtatgaacagaacggaggacgggtttgaggggatggaggaaaggtgccagacaattaaggacattgtattctcatgaaagtgcaagtggtgggcagccatatatgtgttgtgggacccattgccacagtggacaacataggtggagatcatgtcaacgctaagtgtttctgctttgtatatccatacttcaataaaacgttcccaaatcaagggtaacccagttggaaatagagcaagaagaggcatccacagcatacaaagtcacaaggtggggctgctttcataggataagtaagtgaaaaccttttaaatctctctgaatcaatacatgccagtataactccgatcttccataaagctttctaaatatctaggctggtgtcaatatctaaaattccatagccagggttttatctttgtctcaatactgttcattcatttaatatggatccctgaggagttggaatgcactaaatcccataggtcaagtcgtttggcaaagagagtaagtaagcattaaacgacacagaatgaggagcggaagtacccaaaactatgaatgaagactcccaaaggggagtatttgcacattgacctgggagaatccctcttttgtgtgtgagcttgtagaataaaagaaatcagtcactctgagaccaaaataccttgtcctgtgttgtttgttactggatatcaaattctctaaacttctgttttttcaacttaagtcatattatgaaaaggaaattaaatgtatccatcaaatgagataatatacatcaagctatttgcaaacaaaaaacaccatacaaatttaaatgactatcatttatgtgttatagatatgtaggcgtatataacacattagaagttgatgttttttcttagaatatttgcagtgtgatagtcatatagcattcttttctgttcagggaaaggcctttgttgggccatgtggtctaatcaggctgtttgactagatttaaagactcaaagtatttatattatttaggactaacacaaattcaaaatgggaattttgaaatatgaagacattggatgctactaagccagtcatgaatgcccttttaaaacataataataacaccctggatttcaatgacagtgatcctagagctcctttatgggtgatgttctctcatgtttcttaattaccacaggtcatatagaccccatttgcaaaaagagttcatgaggctgagctgtgttatgtaccttgaccaaagtaatatcaaggaaggtcagtcctgagtctattagattgttgtgatttgctcttctgccaggtgcagctaaaggcatttttcctaccttagtcagagatgtgctggcttgaagaactaactcatgaaacctgaatacctgaagagttagtgcaatgtctggagggaggagcctaatgcttgcatgtgtctccctggcttgacccatccataaaaaaagatgtatgcagaatgtctttgctgagccaagggtgacctgcaccagctcttcctccaccttcattcattttgtgcctattcctttcatggtccatcctcctgactgcttcagcccctgcccagcttggaggttctgcttgcctgttctgtctctgacagtccatgctcacaacttgagcttctcttctcccttgacattgcttgaattgtgcccaggattttgtcttcttcctcctggcctcaggaccttgtgaacacacctgactgttgtgacctagtcactcctcagactctgcctctgaactatcaggtgctggatagcaaagccagtccagtgtccctggcatttatttgggaagcaatcatgttaaagaaaaataaaatccatcttcaggtgacctattcccaactcctgatttcatgtgctgatatgtttgtgttgtttagcaaactctcacagaaaatgttatctaaatgtcacaccgctatctcaagggtttgttggacttaatatctaagccttacactgagactagagctgagaatccagattagttttacctacgtatgttctttgtcggacctgcatgatttgattttatccaaatggaaaaaatggttcaaaatggaaaaaagttccaatactgagaatatggatgtcagtggccaaataatatgttgcattttaattttttttgcagtcctcagtgaatttttatgtgtctctctgcgtgtgtggcatgtgaaggaacacaaagttagaaataagagagggagacaacctgtggggtggccacattccagggtctgatcctctttggggatactgtgatatgctgcccagatcctcccatcagtgctaaagaagacagccaagtgggagacagtgaggcaacctaaatgttctcaatggcaggaaaccattaccagccctggaatggaaaaaatacagggggtggtgctgtcacctgcccagaagccaaggtcattagacaggagctgagaccatgaagggatgaactgtcccatgtagactggaacttcagaaaaagtacagccattgccacaggtgcccctgaaacagaaagagagaggaaaaaacacccatacatattcccgtttataaattgccaggcttctgtcagttattcatgttgtaacaggaagctacggggccatgtcaccagggacatgtgcatccctggcacacaaagccgaacagggcatggagccgagggtgaagagacaagtgacaggcaaatggcacctgctcagtcaaatctctgagagtgcagcctggaacccgcatgttcaacaagttgtccagaccattcttatgtgcaccaacatttgataacctttccgtaacatggaaaatcccttaaattgccaggctcttataattgcaaaacaattatagtcatcaattctgatggaaggaagatgttgaattttgtgagcctttccccttctctgattgttttaaccaaatatgataaataacctgtggaatatacgacaaaatgtcccttaataacaaatttctccctttcagtgtaaaattatctggaaaaaagtctcctttttgcacagccccttgggagccattaacatggcattctacagtaatccaaaatgtgcagaagaaagtgaggtacatttacttaaaattagctccacagtgtagtacaactatttccagcattcatcattgttaatgactataattgatggctgaaaatagaaccctcaaatgagaataatgtccaaattcacacacgcacactaattgggaattgttcagcctgtgagcatggcagccagatgcaccccacacttcgacttctttcttcaattcagttctacactgtacttcattaatgcttaaggctttaaaccgctgcccttgtttaacacatgacagtttttatgtgtggaaatgttctatgcatgtaggggtgtgggaagcagacacaaacattctgatttaatccactggaattctgtggcaaatcagctcaaaatgccttagggaaagatcctgtattggctttaattgttcctaatatgaaggattgagaaacgtgctttgagtgcttttgggtttatatgtaaactaggaagggaaaataagaaaatggaatgaacatagcaaagaaagatattcttaaaacagggctgttgctctttatagaaaataaaggtttaaagcagccaagtacttgatttaccaagcaggactgactcatcttcatcagtggagatccccaatacctaaggtacatttttaatataagaaattaacatcattataaatagatttctgtgttgctgttctccaaattcatctcattaaaaacgtgaccattaattgatgatcatccttgagtcactcactcttatcgtcactggtttcttggtctgatactaagaggaggccaggatgtgcagtaaactgtatttatttccagtgcttcccctttccaggtgactttgggtaactcctgcaaagtctgatcttcaggcccctcaattaaaatgataggattggaattagattatctacccagctctttgaatactgcaattcagtgagtctataacacagaaacttacctgtgtcctgtaaagttaaattagattttgccttcaccgcttactataaagcatacagaattactcgttgttatttaaacacgctgcaaaaattagctgggtgtggtggtgggcacctgtaatcccagctactcgggaggctgaggcacgagaatccctcgaacccaggaggcagaggttgcagtgagctgagattgcaccactgcactcccgtctgggcgacagagctagactctgtctcaaataaaacaaaacaaaataaaataaaataacacaccgcgtattttccagcatttgtagtttttctcaagcctaaatcccattcccaactaccaagtacctctttatttcttaaggccaagatcaaatcctatggttttcattgccttatccgttgccccggttagattcacccctctccctttgtgctgccatagcttccccatatacattgcttgcatctcatcatatacaagtctgtccagtttcaattaatttttgtttattatcgactgactcctctacttaacgaggatttcttcaatggttattattctatctaaccatctttgcaaccctgaaggttggcacatattagacactctgatgatttaaacagtttcatagatttttttgcttaaacattttgtagtaaaacattttgttttgttttgtaaaaaatgtttatttttgttagttaaacattttgtggtagccagccttaaccatggccccatgactctcccccactgacattcatggctcatgaatatcgcactcccctcccatttcaatcatggctaacgatgaggccaagagaatatggtagaagcgatgatgtttcctttttgaggctaagttataaaaggcttttgcagcttctggctggtcttgtgtacctctccctctggaggaagccaaccttcatgccattaggatactcaagcaaccctgcagacaatctcaattggagaggatccagggcctcctgccaatagccagcatcaaattctcagccatgtgaataccactttgtaaacaaacctttcaatctttgtcagtcctacagatagctgtagcctcaatatttgactaaaacctgttagccaagccatttccaaattcctatagaaactgaaagataataaataataattattaattcagtaattacttattgaaattatttattatttggcaatacataattaatacaaatttcttcctccccccttttccatgggaaccaatattatggagtcaaaaaaaatgggtttgccattgaaatcttgcctgatacttaatatcaatatgaataatgtattatgaatagtaacagctattggcattattattaatgtattagcaccattaactattatattattcattctaattaacatagccagatgattggtatgcaattaatgtagtaaattagtaataatatcattggtatgttgttaaaacactaatgtttggatgacaatactaacaataattattaatatcaattattatatctatttgtaagtgatagaataattataatattatatctacatgtatgtgaaatattatgatccctatttgaataatgaggaaactgaagcttagagcagttaatttgtccaaagtcaatcaactcgtataataatgagttatgactccaggctagattcatcttaagcatcaaaaactagcactagagctttgagtttcctcatctacacaattggtacagcaatacttaatatgcactgtgcttgtggggattaaatgagatgaaacctgtaaagttgcttgcagaatgcctagaaaagccacatgcatcaaatgccagtttatctcccttccctccacaatctgctctgtttctaagaagcccctgggaacacaggccattaggcagagctgtcagaagcagaagcctcagatcaagtccatttccacatgggaccccaggtcctgaaattgtgcaatgagggtgactcttatatttcctgtggaagaagtaaggttacaactcagtcttttgcctttctcaaactcaggctgagtatctaataatagtgacgttttaccttttgatagtactctggagattacagaactgtttccattttctacttaggagagggtaaatggatttgatgcagatgtgaatcagattggccatggaatgaaagttggaaagtatttgtggcaacaaaccccttatgactgacacacacactccttccttaaaacctttatcttctgcagaagcaatctcattacaaccaattggtggtcagttacacagaatggagtcataagagtcattatctatgggatgttttttcctttattcacaatgaaggcataatctttttagagagaaatacaattctctccagatatataacaaaatatatctactgatgttggtttagtttcatgtggttgacaagaaaaagcattcatttacctgaatacgcagctcaattttaaaataatttctgtaattttattataattcacagagctgcttttattcattttacaaattgctttcaaagcataaatgatgtattgaaagggattgactatccgtaatagctctgatgtgtgagtggctggtggacttaccactttaacatgatctggcatcaacctccatgagctgcgcagtaagaatagcaataccaaattgtggtaaacctcaagagttttcaaggaagcaatatgggtctaattgggcagaagcttagcaagtagaccacagctatttctttgtagaaagtccagttgtgtattacaaagattgtgcctataaggtttgccttgctaaatggaaaccacaaggaatgggcctttggatgtcttcttgaatcagagcattaaagggacttagctggagttcaataaggataacatttttttctttgcaaaaatatgagctgtgtgcaccagcacacatatgtacttggtctgcaggcttctctctaggttgccaagaaaataggttttgatggacagggctgtaccatgaaggatagtagacgaaaaaaaagatattaaaggaagccccctttttaacctttaaacaaagttaaacatgcagtgtttcttaatattgtttaaccataaatgccttttcaaaagtataatatgcactaagatttgctctgtggaacttgcttgggtaatcggatcttttaaaagagagagaaattctgtggagtgagacacagaaaatcttattgaatgggaccccttttctccgtgtgggaatgaactggtctctcaactttctccttagctaactgtctgcaacactacagactcgtatctacctccaacatgagcctctcttgtcctcacaagaacccctcgagggctctactgtgtcctcagtagcagacactgtatcatgttcaggtgcttgtctgtttttttgatcactagccccatcaatctgtttttttccaacttgccgcattctacacattttcctcctcaggtcaccaaagtgcagcctttcatttctacctccagaaactcaagagtttctggaaacttgatttgccccatattattaacaaaacaattttattaacatatatattggcctctgagctgcttctgaccacagacaccttaggttcctcttggttacaaaagctgtggtctatctctgatgatgtacgaaagaagctgatgcttatcctgtggttgttggtcctaacctcctgtttagtctttttgtaatttgaatctcatgcaacttttgtgatactcttagcccatcatcaactgcttagcccatcatcaattgaaaataatcagatatcctaaaatcatcagccagcgaacttttcagattgttggcacttgagtttttgtagcactaagtaggaactatcaccttaccccagtgtcataaatctatgggactaaaaattttgagaaaaactcatataccgtattatattcaatactccagagatctactcaggttaattttcttgtcaagattgggcagcttttgacctagaatatcaagctttttttttactatggggctgtggtacattccattctttccttttaatttagtaacacttggatttcctctctaataaggaacaaagtaaacaataaactcagaagctcccaatgctcttcagtgtaggagaaattatttcacattaccagggaagagaaggaagttgcttttatcctaatagtgatattctcatttcttatctttctatgcaaaatgtttaatgtttccatcttgtggagcccttaattacatccttaccagatgtgatgcaaaaattaagcatcaattagctttttctggattgcacacatccttaaattctgttttcagatcactgcaacttaactttgtgatttatattggaaagatagctttgggggttcatttcacttcattattcttcagcaattgtatttcatccccttagctatttctatggcaattgtgctctgttgagaagagattgaccagtgttgctacatcacaatgactgtgagataaaatccggtagagcacagctagattttgatgagtttttggatcccacacgcacaaaagcagcataggaaaataaaagtgataagcatcattttttgcattcaaagttgttctgatataagacagactgaaccttttaaataaatacatcaataaaatggactaatgcaactgtaagcttgtagtctggtttcatttgataaaagcatttataaaaataagaatgatttcccagaagtcagttagtataagaggtacaatggaaagcccagacagtttggaggacggctttgggtactcaactcatacatgtgtatgcatatgtaaactgtgtgcttatatatggatatgactatagatatagacatatgcactgtcttttgcccaaattatttcctgttatgtttattggtaatatttgcctcattctacatgtagaattcctatttcagcttaaatctcaaatgttagtgaaagcctaattttttatccatcatttctcaaaaaaggctccttacaatatatctcttcatgaagagaagaaacagaagcatcccttgagaggaaatatagcattacacttgtgagcaaggactatggacaagattgcccaagttcgtctctttcatcacatgatgaaccgaaccattggcccccgttctcagtggctctgtatgcctatatccttgccatggtctcattgtgagaaaagagtacatcccgattccttgactttttccttggctctgtgacttctgtcggcttactgaaaggtgacggaagtgaggctaagttagttccaaggctgggcctcgtaagaccttgtgcattttcactttctgctcttggcactgccatgagactattgacttgataactcattagtccagaggggataagaaacatgtgaaacagaattgccccagcccacctatggtacaaagcccagctgccccaactgtcatagcctaaatcagaagctcccatccattctcagtctagatttggtgaacctcagctgaccacatatcatctataagaagtataatgaaaatcccagatatttgaggggctgctttggataataacaacacaaacatatatatgaatgtgtgtagttcatatgtctatatatcatcattgtgagaatcattctgtattattatattacattgtaattttgtgattatttattatgttgcaatagctgaaaatgtgaccacctgttatctgtgtaacttcaggcaacttacttaaactttttctgcctcagttccctcatctatgaaatagaaacaagaattatctactggctcctagaattgtagcacatattaataagttaatttataattaaatttattagactaatgcctgaaaaatagaaactgataaatgaatattacctatgattattttatcattcttctatattcactcctaaaattttctgtgggaccactgtgaagtcaaactgctagagaaagtctggcactgtggccatgacagtggctcaagccaccacagaatgtctgaccagcccatgaggatttgacaagcagcagttacagcatctatccagcgaggacaataagaactactttacctgttggcagaaaacaaagaggaatattttatttcccaccacatcttcacttcccatgttatggtgagctggtcagaaattagtgccataattcttcagctttgcaacttgccggggacaacatgtgtggttggttgactccaaatttttctcagcttcccctgccctcttaaggagtggcaaaaaccaaaaagcatcctcctttaactcaaaaattgttatcaattcacaaaaaaagatcttttagatctcgacttatatttgctaataaactatggcttcaaaaaatgtcataaattatgccatgctcacctatatctacttccacagagttgaacctggatgtaaaggacaaaatattattataagcccaaaggcattgtgacatcttaaaattttattgactgtgaaataaaagaattccatgactgaagaaatggctactgactgtataaatttcttaaactagtatcaagtaaaatataaacacattgactaactctactggaaaaaaatggaagctataaaaaaattcatccataaactcttccaaggcaagctgtgaaagactccagagcatgccaaatgttacccacattagttaaattatagtaagaatccccgcgcactaagtctgagagggattgtttttgtccttatgaagaaaaataaatatgtttttcaacaagaaaaccttctgaaggctgttgaaattttaatcttttaaaaaatggttttaccacatagcaaaacctcaaagttgtatttcacttttaagactctcaaagcattccatccttgcaatttcattttatcctcatctcacatctggatatcctggtgagatggaatgtctttctctgtgtttcacatgctggccttgatcatgggtggcccacactaagttgtgagaaacagaatgagctaagcaaagggaaaacagaagggatgttaaggcagagaatgatcaagggccgtggccaaggaaatacaagcgtattttattacattttcaggcatcagcatctaatcatgatgttggggtggtccaggatgggggggtgtattagtccattctcacatcgccataaagaaatacctgagactgggtaatttaaaagaaaagaggtttacttggctcaaaattctgtaagctgtgcaggaagcatcatgctggaatctgcctgggttctggggaggccttaggaagcttacagtcatgtcagaagccaaaggggaagtaggcacgtcttacatggtggaagcaagagagcaagtgagggggagttgctgcacacttttaaataaccagagctcgtaagaactcacattgtgagaacagtatttacgggatggtgctaagacattcatgagaaatccacccccatgattcactcacctcccaccaggccctacctccaacactggagattacaatgcaatgtaagatgtaggtagggacacagagccaaaccatgtcaagggaggagacttagaatgatggtgggaggtctaggctgtggtgcttgactagaagattctggtgacagtttattaagggagaggtagtttgtgatgggttcagctagatatccacccctggaaaatagagatgcaaaaaattaaacaagagggttcagttctaccccatttcctcttatatagtaatgggacttggactgaattcaaggggtagaaaataggaagcaaagaccagggaagagatgaacaggaattgggtaggtgtgttgggcttggttggaagaggaggttgaaaagacactagacactatggtcccaagagaagagtccatgaggtgaggagtctgatgcaagactctattcctggggccatagcagcacaatccagcaagagagtgacacaaggcaacatttaactctttcttgaccctatttcttagtattaaggaccacctactgtcagggtaggctttgtgacttcccaatgccggtggagctggacctacaggtgcatgccacgtctttggggtccctaggatatacactgatggagctgttgggaaagggacagcatccagaatgtgagaataataggccacagaaacttcatattacgcccatttatttcaaagatgagaaaacagaggttcttagtggctctatgatgtatttgcagtcaggacccagaaccaatgagccaaaaatcccgagacctttcatcctttttttcatcttttttttttttttgcctctgtaagacaccaaagaaattggctaatgttaatttgcttcttctccagttcccttgcttatcacattaatgggaatatcagaaaccacaaaaagcatcatgttggttgcattgctatttgaacatcacaaataatttgttttaaattctactgttactcatttttgatgcttggattagaaagatggatgtacggatagatggttggatggggggtgggtggatggatagatagatagatagatagatagatagatagagaaatagacagacaaatctgaattgtaagtggtttggacacagtgcatataccacagctataaggcacgtaacactttacctcctttgccctggggggttgtgtcgtctctcaagaagtcaacatctggctttagttgataagctaggtgattaactttttatatcaagatccactgcccaaaataatttgactagtgataaactaaatttttatgcagaattatttagtagagtaggcacctagaaaagagacaggaaacagtagactagatttcagtcacgacccttttcctcaccacttggtggcactgagctcaccacttaaccttgctgtaccacactcacctccactctggacactatgagtgtaatagtgacttaaatgaggtaatcaacatgaaaaacactttgacaatgaaacagagttgcatgctgatgccaagtggccttgttattatatgcatttatcatcaccatttccctattcttattaactgactgggttagaacaagttcaaagaaggcaggagctcattcctggaagttgactctactttgttatttaggtaaagtgtgactaccgctttttgtaaatgtgcactgtgagcagagtgacatttttcatgtggatggtttataccagttcatgttcgtgtgttgacagttatgttaattctatgtgatattttccctccagtgcttttgcttttgaaacagcataataaagtgacttctgctaaataaataggcctgttcacaataactgatacttaagtgaatttatgcaggaggtattttggtcttgtggaccaaactaactagctgcaaatcgattaacttcaaggatccagcagagtatttaggataatttctgaagtgcaaatgtaaaagtcatggtagaattttttttggcatatgtgtagaatttctaccatgggcccatttaaaaaatcaatatcataataattacatcaaagcaaaagtaacagagcattatgtgcatgatcagaaagctgcaactgagaggaaagtccaaccactccaggaaaatgagaaacgtgtaattaacatctgcaatttgcattgctccctgacactcctgaatttttatgacaaatcatgctgtaacctttgtaagttggacatcagtaatggttgttttttcatggttttaaagtcaggaatatgaagcatcctctttcacaatcactcatccctactattgccttatatggataatctcaatcctaccccttacaacccacctcactgtagtattctctcttgccaaacatctagcatgcctgcacatatatgagtagcaaaaatgtacatttcttaaagagaaaactgtgaataggagcagaaacctagaacatgtaaatgttttgctgctgttgccaataaagggactgacagaatcactcaatgaatcaactgactaggactgcatttggtgacattatacaaattccctaggaggagcaggtctgccaagagttatgagagatgctatggtaatataattatgaactccctgcagtcaggaagcttataatccaggtgggaaatgacgaacacataaaatgtcatcatcaacctatcaaacatcctttcttcccctgggtcccggtaactgctatcatttagtgagcatttgctgtgtgctcaacacaatgcagacattaattcatttactcccccagatagcctagtgaggtaattgaacatgtaagccccatttttacggacatgaaaactgagctttagtgaggttaagcaacttgcccaagattatgcaactagtaagtggtgacagtgggatttgtaagtaagctcccagacttcaccgtacacctagtgttgtactatttatgaagggtcttatcttttctgtccaggaaagtctcctggaaaacaagacaatttctgtcgtacacatcctgtgtccttctcaacccccaccattgtttgcagaatgaatgtatacattcaacttaatatttattgagtgtcggctctatatttgatacacaatggcacataaaaggataaggaaaactacaaggcagtacaaaaatgcctcattaaagaccaggatgcatgccagctgcatatttttttttatcagaaatatcatgatgaagaatagcctttttatagaaagcataaaaatatgttgcaagaaggttattttatgaaaataacattaaactgtaattgacaattacctagaagattcataagtggcatcacacttcatggcagtctttcacatcatactctagtcagctagtgaaacaactgctgttaaagtcaaggttttggaggtatactgagttgaagagtgtgttccccctaaattcatgtctactgaaatctcagaatgtgaccctgtttggaatagaacctttgcagatataattagtaaagttgaggtcacgctggattaaggtagatcctaattccaatgactgctgttcttataagaagatcacctgaagaatctctgatcacctccataaaaatgtccaggactgaggaatactccctaaaaattctgattctcagcaccacttcaaacgcacaactcataatatctatgaagacggtcagtaactaggatgtttactaagcacactagaagttttttgctcattacagtttgaaaactatggctttgggcaggatgaagatgtagaagacgtagtgcctttctctactgggttcaccttgatcaaggaaatgagtcgtggaaagcagcatagcaaggaataatcttacttgtggcagtaaccccctgtcgaagtacaaaagaaagagaccaccatgaatgggagcaaactagataagtgtactaagaattcacaaaattttatcttggccttcaatttcagtaagcacagcaatctaaacatgtccaataatagttttgcatgcagaccaaattaagccttgataagagtgatagctaccatattttcaacagttgctatgtgataattacttcacacacatcatttctttgaatattctggacaaccctaccctacagtattggtctattattagccctatttaactaatgaaaacagagtttagagaagttaagtgattcactggaagtggccaatcccacacacaaaactgtgaccaatgaaatttaagcctattctcttgatccgaacctcctctcccacaaaacagaacacctctttttaagccatgtggcctgtctaaaacaggttttccacgtggactggatagacttgaagtcagagagtaaaaatgttatttcttctaggagcttcaattttatataaacatttagggtaagaaacactttttatcctaacataggcataaacatataaataattgggtagaattgtaaaatatggaatgcagttttaaaataaaagatgtatgttgaaggaaactttgcaattgaccagaacttctcaggctatcctccatgaactggagtgtggaagggtccccatttagaatattcagccttcgaggatacttcatggtaaacattgtgaaataatctcataggttccctcactggttttgtcccacactagactgcttgggatgtcacagactttcattagttgctttaattagttcttttcaattgattcctgtgttagtttgccccacccctccaacatagtctacaaagtgaaggcagcacacacttttattgacttgagacagcagcgattttctctcatctagttatcctgacctttctttctactgcattttcactgtgggtggcaatgatgatatggctttagtccatttttggcagaacaaaggaatttcctggttggacaccaaaaggaaaaaacggtttttccacgactaagcagtatcaagaatatgccataacaagccttacgtaagccatggctcatgcagtctagagccgtcctgttaaccaactcacacccactggctagagagaaaacatggcgaaatgtcagagctgctaactgagatagaaaacatacaggctgccacatgactagaacatatggtgacccaacatggcagcagcgagaccctcggcatcaagaaaaaacaacaaaataactccttaaaaacaagggctttttctaaagtggaccttgacatagtcaaaaaaaaaattatatatatatatatatatatatatatatatatatatatatggcttcttcacatccaggttcccaaagatgtaacttaggaactaggtacattttaaataatttgttgtccagaatgtatctgtttcacaactcagaaattaaattacatagaaaaaatagaatccttcttaaagtttttcaatgaatacatcatcagtggatctttccaaatattttttacagctgttcacagaattaaattttagctttcttctcctcaacatttccaaaagtataacgtagaggattggtttgtttttaatgaataaatcattcggctaagcccatggaacaaattcatacttaaggtagatggtttagagtggactttcggcagcattattttaggaatgtatctctctaagcaattgagtggtgactctaaattgtgccaatatgccaattccatttgcatatctttgtaatttggactcttcctctcctgctgaaagatggttggataaaacattattggatacagcacaaacgcaaataaagcatcgttttcctgctgaaatgcaaaccaaggctttattttgactggccttaaattttgacctgtaactggcattggaaacatcagtgaaaaccgagaaacagccactgcagcatttagcgtcacagatgctggagcagaatcgagtttagaaaataaacttttaagggattacagcagcagacgttatataacaagattagtataatgggtgggacatctgttggctgttttcagaaagccatcattctattaccctctactaaaataatcttagtggatacctgactgttattgttctttttttccatatacccccagtgagaaaggttgacatttagttgacatttctatgccgtagtcttctcttctttctttttatgtttttgtttttatttggttagttattcttttgtcattgttttaattgttcattttgcttaaaagggaaaaaaagactgtcttactacaaaattagtatcataattgttttttctcagttagtgttcagggtggctttaccttacacataggaaccaacatacctcagagtatagcagagaagtgttcaatagctattaattgttttctttccctttccattcccttgagaagattttgatattcataataaatgttgttttaaaacataaagcttataacactgaattttaccttaagactataatagctgaaggagaaattcttttggaagttaaaatatgttgaaacatctgtatcaatcactctctctctctctttctctctctctcccatgcaaatgtaccaatacaccatgcattctggctccatgccactaagtcatgattttccacctgtaatggattcccagcccccgtgcaggatctggtgcagtgtgccgaagagaggccaaagtcactgtacaagccagggggaggggggggtcatcttcctcaaggattagtaacgattaggaagaaaagcattgtctttatatacagccaagcatgaatattatagatactacattactaaaagaccatgtgacaaaacccaaatttaaataaaattttgtagggggcattttgggcatcatcccaagttcccgagggagacttaatagccctcaggaatatttgcatataaacatttgaaaagcacttaattaattgataagaccactggaagttgtgagttcaattttcaaaatatgaagcagacaatgttgtggaggatggacaacctacagagggtaagagggaggagaggaaaagctatttcttccgcagagagaaagccagggggcccatgtttctacctttttcctcaagtggtctttccttttggggtccctaagtcagttagtagtcataattaggtcactcagagcccactgatacagtggagagatatgacagaccttttctcatatcctccagttggctacactgattacaagctggaaagatgactaaaaaggggtgtctcctccagggatctaccgtctagctgaggggcatgttcctctatctggcatttaaagagagagatgatatgaaatagctacaagttcataaagatataaagcgacaatcaaaggtttggaacagctcatgcgtgttgggggaggtagaggctagggtggctaataggagaggcacagatgtaactcaccattttccttcctttcttttatgttcacacatgcacacacacactcacacacacagcactgttgccaccagaatgcttttggtttgtgctttcacattgtagaggacatgaacctatggaaaattactcaagggagattgttctgttgaggtttgccttttgaacgaaaagattctttcttgcaggagtgggagggacatcagcttgagaaaaacagcttttgtcctcacaaaaatgctcttttggaagatatgttaatgagcttcctttgaactgtaaatggcatctgcatgcacgtcagatgctaatggaaatgtcgagaaaacgataaggcacaggacgattgcacggttatgcagtgggccccgttccttcgagcatcgtgaccaggctgcggagccaccttgtgacttggcatagcattctcattttgagtggagatttttgtttctcccactgatggcatcttttgaaagtcaagatgtgttggctttataaagcactatcctccctgggcaacctcataagcagcaatgaatgacaattcttccttgaaatttttaattacttcaacaaagaaagtaattattaacttttgtctctgaaccacctctgcagatattcttaatcaaataaaagaaagaggaagcagagctttctgagaagcaggaggatgaaatagacaataggggtctgcagctggattgcggggtgacatgagcgctgcatgtgtgctggataaacaatggctccatggttggaagggtaatttcatgtcatagactagatggcgaggaagaagtttgagtcaagagacctattcttggcactgtcttcttcgtgtaagggtaccaagggcaccatgggagtgatggcaaagtataggcagcagcccgtaccttatcggagtgagaagatgaattacattgaattaacacttgataggctgaatgttgagagatgaagtggatatctgaccaattttctcctcacctcttgatttggattctcccaaaagcagaccctaagacaagaattagagtgcaggtagattatctgtggatcatgcagaggtgaggagagttgacacagagcatgccaccaagagcatcaccctgggaaaccaggcatttatccctctggagaactctgggatctctcccccaagggtgatcgaacagggggatttaaacatcaactcccgtcagtctttggttgaggctgccagggtgacaggcattaattttccaaactccagctcactagatatttgctcagagcctgccagcactatgaaagccctcaggcaaagaagtgcaggtgcttggccattgtctggctcacacttactacttagacccacgggaacatgaacagggcacctcagtgctgccacacctccagactgtgtgggcccgcttatcttttatggatttgctaacaaaccatcaagtaatccatttctcacatagaaggagatctgtaactcttatctagaaggatctacctagcattaggcaagatagacatctgcagagatgtgtcttggctctgggtggctttggccatgtgagatttaccctcacagctgatggcagtcactgcacggttgccctcggagccagtttcctgtcctttgaacagagtccacagagaactttgagagacacgtttcccaatggtcagtgtcggatggggccccaatctcaacaaatctgttgctgtcactttgttagggttacatgtatagcgtatattgacttcaagtgctcttttacaaaacaagtcctgacttcttaccactggtcagccaaatgctaaatatggtcactcctgaaattactagtaagcaaggagcgggtagcagtcactgttggacagagctcaggtggccggcttcatgtgtgattggctgctgccactcagaacgttggaaatgatggaaaaaatgggcatgggaagaaaagaattcagattgtcaaaaatagagcgttattgtcctaggtcaagtgtccatggaagtagactgagaggggaattgcaagtaggaagtttatcggattatgttcctgaatcatacctgggtggagaggaaacatgtgagaagcagggttgggagaagttgaactgtgatccggtcacagcaaaggcttcggctgatcccaacaggggctcaggagtggggaaagtgtcttagtctactcaggctgccatcataaagtaccacagactgggtggcttaaataacagaaatttattttctcatagctctggaggctagaaggcaaatatgaaggtgtcagcagggggcatttcttctgaggtttctctccttggctggcagatggccatcttccccctgtgtctttacatggtcttccctctgtgcatgtccgtgtccaaacctcctcttctgatgagaaaacttgttatatgggattagggcctatccccgtgacctcattttactgcattacttctttcaaaactctgtcttcaaatatagtcacattctgagatactgggggttaggacttttatgactgaatatggaggagacacactttggcccagaatagatggcccttccgagctgcatcaaattgagggaagggggtctgggccttgaggctactccgtgagtcagtcattggatgcaggctgacttcaggaagagagaagcagcgtgggtgaggtgcctgcttcagcagaacacagtcctctgagagccactccttggagctgtcagtcaccagcacctccagcaagggaaggatgatgtgcattgtcctgaagggaggggcagccaccacgagcacacggcagcttcctctttaatcgtgaaaagaaagcccattttttatctttgactggcatttcccctcagtctctcccaggatcatctctttggatacaagggcagaacaggtcatgcttgctgtgctagaatatagaacggcaggccctaagcctgtgtgtgtgtgcacgtgtctgttccacactaaacatatggagcagcttcaaggaccacgacagatgtgtcgtttgtgaaattttgatcaatatgaggcaggctcggaaattaacttgtgtgaatgagcctccagctcaagccaaaataactcttggctcctcagatgcatggccatttttcttattgagttgaagaaaagtcaagaagagcaatttatcaaaacaaaacaggaagattctgaattctgctgccacagagtaatgacagatatactggctttgcaaaaaagccccccaaaataaaggatcctttttatgcccatagaagcaattttaaaatgcaaaaatgtactttgagagtttgtggattataaatgttttccaattcacccaaacatctctgggaacatggggagaaaaattttcccattctgtaatttggagattgaagtagcaggttctgtggtgttgtgcacaagtgcgaacatggctaatactttcacgaagaagaacaatgatattcggtgacatttgacaaagatattaaaatctcagaatacggactcctatggggtcttgtgaaatctttatccgttacaccatctccactatcagcttacctgtttcccgtttatctcattggctgatatgaccagacaaaaacagagctgcttatatataccatggcctattttcatgaatgtttcttttaagatagaatttctcataaccagcctgggcaacatagcaagactctgtctgtacaaatattttttaaaaaattagccaggcatggtgtggcacacacctgtagacccagctactcaagaggttgaggagggaggactccttgatttcaggagttctaggctgcagtgagctatgtttgcaccactgcactccagccggaaggacagcatgagattctatctctaaaataataataataatagtaataataacatgattttcactataacagataaaaaaggtgcccctgatattctcatctggctatacctcgtcttaacctggcttacaaggtcagggtagaaataaaggactcagcaagtgaacactgattttatttccatgccagcaccagggtaggtgttttaggtaccttatgaataataactatgcaaacaagcaactgatgtttatggagcatttactctatgtcaggccctttgctgaggactttatgtagaatttctatgtggtcattataatcaacggtggcaggcaggattctaagatgatctttcagattcctaagtcatggtgtacacagacctcccaattttccaaaccataatactgtaaagggattttgaagacgtaattaaggtctcaaatcttaaaatagggagattatctaggtgggcctaacttcatcacatgagttctttaaatttggaacagatgtggaggaagtcagagaatcaacactgagaaggagttgacatgcctttgctggcttgaggatggaggcagaaatatggcaaggaatgcaggaggcctccaggagctgagctgtcctccagctgtcaaccagcaaggaaatgaagacccccatcctgcaactgcaaggaactgaattctaccaccaatgaaaaggagtttagaagtggatttctctcctgagcctccagacaagggctcaattcagctgacaccttgattttagcctgtaacaccctgaatagacagaacccagtcatgcaatgtcagactttagacttacagaactgtgagctaattagtaggtgtgttttaaggcactaacccccagaggtcaatgtctccattttagagatgagcagactgaggcttacaaaacttaagtaacttgttcaaggtcacaggtaaatggtaaagtcaagtagggacacaggcagctgcttccatggagggaactgcgtgggaggctgaagttcaaaacagcctccaagatgccaatatgatcgcccctaggtgtgcacatcttgttcagttttctccccttcagggtgcgtagaaccttcaaatatgatggggtagtcactctgttgattaggaaaagagatttccacagagggaataaaggtattgaatcagtctggctaattacaaacaggtggacttgactaattaggtgggcttttagaaggaacgtagaggtgggaggtagagaaagtgatagaggcacactcttgctggcgtggaagaaaaagagcgctcgtgtcctgaactgctttggggaccatatggcaaggaaatgcaggtggcctctagaagataaaagccatccctggtcaacacctagcaggaaaatggtgacctcagtcctgcaactgcaagggatcaaattctgccaaaagctctaatgggcttggaagaggattccaagcctgaggtgaggactctagtgcaactaacactttgattgcagcttttgagactcaaagcagaggacccaactaggttgggcctggactttcagccaactgtgaaactgtgagataataaagtgttgttgttttaagccattaattctgcggtgatttgtcatgtggcagcagaaaactgacatgctgggagaagagcagattgctctcttttgcctcacttggtgggagaggagggactaggacccaggcaccccaatttcttgttcttaattaatctgtagtgattgcttccctttgctgctctgtttatccctgagttactctgagtactggggaaacttcacttatcctggtcctccaacctctcaaaacctgtctttgtacaaatttgatacttaagctttgaaatttaattcacttattaagcagcagccactgttttatgaaatcatcccatccaaccctgcactggtgagactgttgatttctctttcatgaaggctgggacttaagcccagctgtccatcaggctatatttacccaggatagccctccatcagtcctcagttaaagcagcatttgcatcacaccagatctctaaatgttggttgttggggaagcaaattacattcatcagaatccattcattctcctcgtatcactgaacacaggataatcttggctgtgtcagctgccctatgactggtggctctgaaaaatggaggttggctgcagatactccaaacctgcttcgctgtgtcaccctcttcagggccagtggatatgatgctggaaaagattaatggaacatatgtcatcacatttatggggtaggaaacccccaactgtggattaatagatatcttggtgaaagacatacatctttactcctttatgcctcgatgggtgagctacagttggctgcagtgaaaatacacagagagattacctttaggaggtcagcttgtaaaggacttttttcaaccctgaggtcaacaaaaatagatttttgattgttgaccaagagagctgtaacataggacttttaacctttaaaaaaattcttattgaagtataacatacagaaaagaacacagttcctgagtgcacagcttgatgaattttcacaaactgaacacatccagggagccagcatccagatcaaaaaaccaggatcccaggcatttccctaggtctctttgcaccaaccctccaccccagggtaattgttacattaacttctaactccatcgatgattttgcctctttctataaggtttttgaactttataaaaatgaaatcatccagtgtgtcctcttttttttctgggttctgttatacaacattatgcttgtgagatttgcccgtattattttgtatggttataaattttttgttctcattggtttttaatattccattatatgagtacatcgtaatttatccattctatcatttatggacatttaagtagcttccaatttggagatattgcaaatagtgctgctatgaacattctagtgtgtgtcttttggtgaatatatttgtaggttctactaggtatctatgtaggagtgaaattgctaggttataagacatgtacatattcagctaatttactatgtactgccaaataattttccaaagaggtttccaatttttattctcaaaagcagtctatgaaagttcctgtcagtctatatctttgtcttatatcaagtataagacaatacttgatattgtcttttcattttaaaaagctgttagtttttaatacatcctagtttagagggcatcattgttgctactgtgaaacgattaagcactctatatgaaaactgggctgaagagccattgtactcaacatagtatcattggataagatgtcagttggtgacaataatgcctcatgccctttatatagtgcttttgtttttcttttttatagagtgctttgcaaaaccatctaggtttctctgtatttctgttctcagctcttctggcaaacttaaaggaaagtcctccgaaatatcttatgtttttggttctagaactaagtacccttgaaaactatctgccacatacctacattttagtcaaatctgtttgtctaaacatatactctgtggatatttacagagctcctattatgtgtcaggacctatgctatgcactggtgatgcaaagatgagtgccacctgattcttcatgaggttccagtttaagacataaagtgaactgtcagattgttagttctaaaaatattaatgttgttttttgtattattttctattacattttagactagggaatcatctgagtttattgacagcttgttcataaaagagcaaattattttaaatatacaaagttgctttaattacaagcggggatggaaactttaggaagttaaccaagaagatgggccgggaccaacaaaagttcatcgaaaaagaagtaattggaatttgagaagccttgacagattgcacacctgtaacaaagaacattgttattctttgtacttcattgctcttctctacataatattcactgaaatgatattgaagattacatcagctggagttaagtcagataagcagaatccttgaatgatatgggttaatggatttattgcagggattagatcttatacaattgtgggagaaactgggaaagtaacattccacaaggggatgattgactgaatagaaaagcttctaaccggggcccatggaatggagctggtgaagatgtctatggaagtcccttgcctgtccatctggacagggccagaagtatgtcagcagggcagatgataaaagaggaagtaggaaagctgcatgcaaagcgggagagaacaaagacaaatgaaagtcacaagggaaaactggaatccacagagatccacaggcccatatatctgtctctcactgattggaaccccaaagctgtgatgtcctgccgaaggatccagtgctcttgctgcagaacttcatgtgggcccagcccagctccaagaacatgtggcagaagaaccatcaagaactggagaagctgtggggccagctgctactccacacccatgtgataagcaacagcatgcatgatcgcccaagccctgcacccaccttcctggcacaaagtctctgactgcacttctgccctacaaatctcatggaaatttctctgtggccagccctaacccagaaccattcagagaaatgcaacttcagcttaactaacttttgacatagactgtaacagaggcatagaaagaaagaaagaaaaaaactatagagatgagataattccatcttttcttgagaaagatgtaaaaactagggtgaggagagatgatggcttgtccgatgtcacagaactagtgacaggcctagaaactcaattctgtgtgtgtgtctctaggtgatatcacagaaaaaacaaacaaacaatctctggatgtgaggttcatgcactgtctttgtatagtccaagccactcaagaggtttgcttgaccctagaaatttgagtccatcctggcaacatagcaagactccatctctaatgtatttaaaacattaaaaataaattctaaaaaagaagacacctgagtttttgccttaattgattgcttgggccttgggaaaaaaaaaatcactcgattcctggactcatgttttctataagtgaatggcatataggctaggcccaacaaattggaaatgatcactttatatctgatgaataaatgaatgaatacaatctctcaagaaccactatttcacaaaattattttactgcctaacatttaaaaaaaaatgaaacaatgctcctgggcctcaatagcgaggcattcttataggttctcatgaaatttatctggggctagtatggggcatatgggccctttttcctttgtacaagtcagatttccaatctctcagccatataacaattagactttctcctcacccactgtgacttcttttttacttattcagtctgggcttttcagtaggagtcaagtactacatagctggaaaaacaagagactctggaaaaacagttacagggagaagctggaagaatatcagatttctagttatgtattttgatggttagctcatgaatttgaaatcagcatttagcaggattgacctgtttcccgctggtgtgacattagctgggatggctcaaaggcctggagttgaaataatctaaagtctacctactttcagtgagggtagttggatccatattgtctctctgcttcctcatggcatggtggttgggtacaagagcgaggctcccaagaagaccaggcagaaactgtatcacctcatggattacaaagttatacagcatcatttctatcatagtcataggcttcccagattcaagaggtggaattacagttgacccttgaacaatgtgagggtgagtggtgactatccccagtgcagtcaaaaatccatgtataacttttgactccccaggtacttaactactaatagcctactattgactagaagccttacagataacataaagattgattaacacatattttgtatgttatatgtattatatagctgtattcttacaataaagtaagttagagaaagaaaatgttattaagaaaatcataaggaagagaaaatatatttactgttcatgagatggaagtggatcatcataaaggtcttcatccttattgtcttcacattgagtgggctgaggaggaagaggaaggggggtaggtatactttctcaggggtggtagaggtggaggaagtggaagaggaagcagaagaggcaggcatgatctgcttaacttttactgaaaaaaatccacatataagtagacctgtgcagctcaaacctgtgttgctcaaggaataactgtagatcccatttcccaatgaggggagtatcattattacactgtaagaagagctgtgggatggaaagcgcatcgcatgccatcttggaagacacagtctgccacaagcactgatcagtacccatggtgcattcataaacacggagcttgtcaactatatgagctcttgttcaacaataaccccagagaatatgtttgtgcacgcttataataaatacatacacatatacatacataataagtacttagtgaataagactaattcttggattcaccttgcttccaagacattttccgtgttatgcctaagggtaagggcagggaattgggccactcaattaatttaaactaaaaagtgtttcactgtcaccatccccgcgcttttttttttttttctgggaaaataagttgggctgctgagttttggacttaaatcatttccatggcaacagagcctaaatgataaaaggcagattatagttccttccaatatttgaaatgtctgtatatggtctgcatggctgaggcaggcagatcacgaggtcaggagatcgagaccatcctggctaacacggtgaaaccctgtctctactaaaaatacaaaaaattagccgggcatggtggcatgtgcctgtagtcccaactactcaggagactgaggcaagagaatcacttgaacctgggaggcggaggtggcagtgagctgagatcgcgccactgccctccaacctgggcagcagagcaagactccatctcaaaaaaacaaacacacacaaaaaagtacacttagcagagaataacattgccattaaccccccatacacaaacacacactcatacacactcatgcacatatttatacacactcacacaagaaacatgagtgttaaatttcataatttatattaaatgattttaagtatgggggaaatgtgtaggaatgacactgttcagccttgtcttctcagatctgcattaagccaaattttcttgttttgattttttgatcggttggttgactttagaaatattctgatcacgtaaagcctgggggaaaaaagtcaacaatcgtagatacagaagtgagaataattacgatctttggaaattccaagtagttcaatgtggcttgagagtcgtttatgtctgagggaggataatgaggctgcacagtcttatttttaattttaggatttttgattatgaagtgtttcaaatatatataaaagtatagaaaatataataatatgagagccatgtacctatccccatagttagcagctattagccatttgccatgtttttctcaaatcccctttctttctaaaggaataaagtattaggtcttcagtcaattccctacttacctcctcctttacctccccaccctccccagaactcatcattctcaaaaagttatgtgcgatattcctgaggcactttaaatttttggaatgtttttgagcagacagcgattcatgaattgggcagctccaaattgcaggtgattctgggctccactgaaggggcatgaagggcttttgtagagttgacatgaaaacaagtcaaagaaaatatatgatcactccaagtggagcaatagccttatttgtatcattccagtggaaagaccctagttagagattagttggcagtgtatgactggctaagcttaaattccttttactgtttacactttggtttgattatgtaagaatccaggatgcttaagccacctcagtctaacagcctcccaattaattatttaaacagtacttatgaatagatccctacactcttgtatctttacgttttgaaagtgtgcagaaatggtatcagagagtatgtatccttttgcaacttgttgctgtcactcaacattatgattttgtgctttagccacaggacataaacatgccatacagagagtggagatgagcattcactattgcacagtttacatttattcaactaaatttagagttcacctggggaatgagttgacaatgacaggtttagcatttatagaaaatgctaatgataggcagataggactggacaccagacacgaaagtgaacacaagaaaaaagaaatgtggttgtttgtactctagttgttccatttcccgtttcccttataatccatcctttgaaggcagttataagggctgcatggtctttgatgattacaggttagaaactgagtgattttccaagaggcagtctaccctaagtgaggtctaggcttgggcagagactaaggagccaaatctctggtcttccgtcagaaaatgtgattgtttataacccagcccctacttcttgcccctgtagatctccttttctactgggaactgtcttactagtgagatctgcatcacacaggtttggagagcagggaggttaggtgggtgacttccatgggggttctttcttgtcctgccatgtgtacacccacttccatttcctactgccacgagaaacacctcatttgatgttctatgcaacttgccagtgagtgcttttcaatttttttatgttgttaaaacaaaataactaaagggttatttatttccaggacacaaaattaagtcactgatttaatcagatatatgtgagctattatgtatactccgtgtctcttctccatttactatattactctctgaatgtttccaagaaactctttacatacagaagttccctcaaaacaaaaaagggactatgcacacattttacttttgaggtggcatttacttattcaataatatctacaaaattaaatgttatatcgaccttgcgtcactgtcagctagttactttttatttctgttgcatttccaagtgtgttaaattaaagcaagtggcttcatgccaactaaactgcatggaagctttttaggccttgttcaaatactaacaggtttgataaatatatttgtctagcaagagtaggacaatgagctctttgtttactgacatactttattgtcattctgctgtatacctctcgtgtggctgttttataggacataaagtctagctatcctgtcggaatctcagatcttatttatagcttgctgcaaagtggcttattgtcatttattatttcttatttgatttatatagcatctttccaccaaagagcccataggtttatttatatacagagtacacacacgcacacacacacacacacattcttacacacatccttgaacttcactcaatgctatgatgtagatagcagtatagaaccaaaaatctgtatgaggcctttccatttgtttttgttctacggctatgtcctggcagggcaattgccatattttttttcactttgagtgttttatcttttgcctctaggtggatcggatcattttctgtgtcttcttagaagttgacttcaaaatctacaaaaagaaaatgaatgagtttttctccgtaggtgagtaaagcaacttcttgttttctttcaaattgaggatggaagaagtggagccgtcacttctattcctattgtttttcatcttcaggactgttacacatggtgatcctgccaacttgtatcatagtttctaagaactgaacaaggtaacagaaaatctaggctgtggaactcttgccccaagaggtcactgtgttgtcttggggaagtcagttcatctcttggttctcggtgcctcacatcaaaactgaggggctaattattaataaaagatttctaaagatgcttcccctggccttaaattgcatgatgtgtgattccttctccaacttgtaagtttaccaggccccatgcctgcatctaccatgttaaataccattgttggaaattgtaagcccatttatattcatagtcagaattcaaacttttcctgcattccatccctattccttcccaagtttctcactccaaatttcaatgcctatagtagcacttctagtgcagtctgagaatggcagtcattcacacttctttttagaaaataggagaaacctcagggttattagagaaccttgagtaatgtatttacatcgattgaatgtgccgttagttggatttgggtaatttggatgtttttctccactctccctcttccagcctattaaggctgaggcttgtttaatgccttgttatttttatggtgccattaaagtcacagtgtccaaagtgctttccttagccatggcaagaatcgcttccaggaaatttcaagctactgtgagcattgttggtacttgcctttcagagagctttcttttgaggtttctgtctccgtctgaagtagtttgtcatatcacaggtgactctggcaggtgggatggagtgaatgaagggtgctgatgcatattcatcctcttaagcagtctatcagagccaaacaataaagaggatgccttgcctgtagatcagagtaggatgtgttctatccagaacagctgtagaaaaccaaaaaaccaatggagatggtcagctctctgctaatgccctaaatggactaagttcttctaagtaatttcaagttcttctccctaattttataattgaaagctggctctgctaagtgcatttaatttaaggcttcaactaaagtattcctctaactgaaacataatgtaaattcctcagattcccatgtgataaagaagaggactgtggttataatctttttctcctcttctttctctttctcctctgcctccttctccttctttcacctttcttcatttttttcaagcatctcagtgttttacagagtggaagcacataacagctatttaataattagttgttgagacgagttgaattaaataaatttttcttgccttaatctgatgacttttattgtttcaatgtccttgctccatttttccttttgacttgctttatgacaatattgagctgattggtacctgtattttgaagtattgttaaaagaaaatgctaattatatttttaaatgtgacttgccatgatgtgtgaagcaaatattctcatgtcttgtcagtatcacatcataattgataagattttataaactttagactccttgagatgtttggaaataatgacatcatattcattttcatgtattctaaaataaagtctgcaggaagccatactaacataaggtaaaaaataattgcataattatgatctaattgatattgaaacaaatatttctatcagcaggtatttccaatgatgcacagtcaaaaagcatactgcaaattttttttaaaatgagacagttttaggagggtaaaatatattaatacttatgcaaacaaattattgtttgaaaaattgctactttaaatacattttaaaatgcattgcagtacatgagcaagtgaaataataaaatcatcctcaatctcacatcaatgctttgaagcacacagtgctcatgaaattattttcagtccatatttacaataggaagtacattttaaactaaatgtcaaaatcctcaaaaattgtgatttctgcaatgttgaagcattaggtatttgaaaattctaaatatgcaatatgaaataagcgtgatgtatgatggaatgtgactactaatatacataatataccttacctgtcattaattttaacttgtgtttaattcataactataccatctttaaattaggatacgtttcttcctacttgccatgtatttccctatagtgcattattattcatgatatctctaactagtgttcataatctttcccaatgcaataatgataatagtttagaaaagaagtcatttttataatcaaacaaaatatttgtgttttggggtactttaatcccatgtctgtaaattttataattgggaatctgagacacaatgcatgataaaacaataaaagactcaaagagatcatactaaaggtatgccacatgcataactactacagttcaataataatggttcaatgataattgctattacagttcaataataatgattaataataatcataattaatatatttaataacataacaataatggttactaataattcaaacctttttgaattgctttctattagccagccacagcattcatttctttacatgggtaaatcactaatcttcatgataactctaagaaaggaggcaccgtattaaccctgtgctgtggttccattgttagggttttttctaatttggtcttaaggtttctctctcttgagaatggccatcagccaggatagtcactctccaggaaagctttgaaaagggttgggggaaaattgggttcagatatgtatgtcaggggagacacagcgaggaagtaaaaccaaaatgcacaaaacagaaggcatttattactcacaagtcccagacaggtgagggatgcccacaggagaccaacaggaagcctggaggtggcagggagcccagccagcaagtgggcagcaagagagagcaagcacctgggggctgtctttattagttctgtatgcaccaccccttaggctttcccatgggggttgtggattggctagtttaaagaaaacactcaggaagcaggaacttacttcgatgattctgacactattagatttttaccatgatcagcagttgtggagtatattgggtttggggtcagctggatgaggaacaagtggaacatatcacaactgatcacacagggagggaagtttaagtaggccaaaggtgacaggatacaactgggtttcaaacaacttatgtcaggcctaagaatggaggctggccaggcacagtggctcatgcctgtagaaggaggattgcttgaatccaggagtttcaggctagcctgggcaacatagcaagaacttggctctacaaaaaataaataaataaaaattagctgagagtggtggtgcatacatacctacagtcccagctactcaggaggctgaagtgggagaatcacttgagctcggggatttgaggctgcagttggctatgattgcaccactgaactccagcctgggtgacgaagcaagaccccatctctaaaaaatataaataaataaataaataaatattgtagagattttaaaaccaaaaggaaaaaaagaaaaaaaaatggatgccaaggcagcaactatatgaaacaaatttatgataccctatgttttaggcatgaaaaacgaggattcagctaggaagcaacagagctgtattttaaaattgagattggcatctgtcattgcccaagtgataataggttcgttttctcagagcatctttagagaaggctgagatcaacttccaggctgcatttggagtattggggaaagtcccatttcatctgctgcccatcatttttcagagatgccatgcttctcttcttctagtacctataaataccttcatggaaacttctaatatgagttgaattagtacttttatcattcatctcaaaattgaattccattcacattatagaggtattgtggtgctattacctgcagatgagcaggtaagtggtaaacgagaagcccaaaggcctttatagcatctacaggacaagatggaaaatggcttatattagtttgtcaggcctctaaaaacaaagtaccacagagcaggcggcttaaaccacagaaatacattttctgattattctggaggctagaagcccaaggccaagtggaggcaagattaatttcttcagaggcctcgctccttggcttgtagttggctgtcttctccctgtactttcaaatgaccttccctctgagtcatttgtgctgtatctttctctttgtataaggataccagtcaaatgggatttggacccactctaattaccttattttaatttaattagctcttaaagatcctatctccaaatacagtcatattctaagatatgagggttaggccttcaacataaaaattcacagggcacaattaagcccataaaattgccccttgtagaaatgctttaagaaactccagggaaagaaaccagcatcgaattttttttcaacagttttatatcttgctgtggggtaaagcacatttgactttttccttccacaagtattatttgaaagtagagtgtggcagctttatggaattatcatacactttggttgcaaataatttatagttacagtgcaccattacatggcctacagcaaataatatttgtatgattcaactcagaaatctctttgttctttacataaaagtgcttgtattttttcagtgtgtagaatttattgtgtgcagttttcactagacgtaaaaaattaaaaaaagaaaagaaaagacaattcccgatctggaatgtggaagtcattttttcttttttttctactagagtcttagtcctgctagagaactgaaggatattaattttccccgtaataacaataaagaacatacggtttataacggtattaaagaatcttgacgttggaagcttaagacttgtcatggtaaaccctccttcactcctccctttaggaaaaaccaacctttgtttactgcaatggttctcaactacgagcgattttgccctcctggggacattctgaggcatttttgtttttcacagctgagggatgggagaggttactgtgctctagtgattagaggccaggggtgctgctaagcattctacagtgcacagtacagcaccctccacaaccctccagcagataattattcagccttaaatggcaatagtgcagaggttgagaggctccatctgctggtactgtctcttaccactcaggccattgccgcagtctttgcctttggattggggttattttacagtgtttcgactgctgatgctttacccataagtaactatctagctggatttggaacatgtaccctcagcctggtctctggcttcctggattcatgaccctcctagtccagacttctggttttgcaccctctctgttcactctgtacccacagatttctatatcttgacctttgttaaccacatacacctgccacccaacccctactctccaggtcctcctgccaccaccccactcctggtatcatttatctattactgcccatgaatctagagtaataatctcagaaaatatgatcattacataggttttatatatctaataaaagtgtggaactaaaggctagtatacagagcaatgaagaacaaattcactaattattttctttatataccttaagcaagtttcattgcttcttgggctaatacttttctttttttttttttttcattagtttggtgaccattggttgataaacttaccttgtgagctcacaaaatatgttttaattttagataccttcaaccccttatcattatctgcatagtaactgattcattcacaatgaaatcacctatgactgaaaaaactaccaactactattttttaaatttgtttttcagagtcagggtcgtactctgtcatctagactggagcgcagtaacgcaatcatactgatcataactcactgcagcctcgaacttctggggctcaagggatcctcctgtttcaacttcctgggtggctgagactacaggcacactccaccatgcccagctaattttatttgtttgtttgttctttagaaacatggtctcaccatgttgcccaggtttgtcttgaactcctgggctcaagtaattctcctgcctcagtttcccaagtctttgggattataggtgtaaaccactatgcccagctctaatctctttaattttttaaccataaaaacaattaaatttgtcaattttgtttccagctttgaaatttatataacgtatacacaatacgcatgtcaactttacttaaatgtgattaacatatatatatatatatatatatatatatagagagagagagagagagagagagagagagcaatgctgggaaaactaataagataggaaaattaattgcaggatatccatgtgctcatcccaaacctgacacctgtttataagaggaagattttatttaagatgaaaaactctatttatgtctatgaaaataattttaaaactatatttaaaaaattaatagaaaaaaagctaaaatattcccaatgttcttgacataaatagtaaaataatgagctatttgacctattaatatttgggacatctatctggtacaacataaaatgataaaccttataaaattgcaagaagtttgtatgccttaaaaatgagcttgcaaaatagtagacataaaacatgtataacaagtgttttgtagttagaactaggtaaacttaatccataggagttataagtttataaattataaactttactggaaatgttttgtggtcttaaatacagattttctttttgtattatatataacataaaagcatatagatgataaagtaaaaccctaagtcaagtttgagaattatatctcgggaacttcttgaatatttaacatatctcaatgtctagctaaaatgcatacattttatttctcaaatattgacagacatgttattaattcactttacttgagtacgtgaacatatttaggttacatgtattttaccttcttagatacagatagcactgagaaagtgtagctttgcataatcatgataaagaaaattctaaattcatattttgataataatttttaatatcttaaatgcatgccaaaatttttaaaacgaaacaaatcaagaaacttctcaaccacgtttcacttattttgacctccttatagtcttccaaacatgtaataaatattattgatatgaatatatctttcgtttattttcccaatcatgaatttctgccatttatttctgtctaaactatacacactcctgcaaggcagctttagttgggttttatattattattattattattattattattatttgacctttttatcttgatctcatcaatgaaaaaataagtttctggagaacagaaattattcctaatattccattgccctttcagaatctggaaaattctaaatatatagtaggtgtttattaatgtaaataaaaacgtaccacgaacctagactgaaactgctacagttggaatgtgtatctcctccaaaactcatgttgaaatttaattgccgttgtaacagtattaagaggtaagacctttaagagtgataggccatgacggctctagcctcatgggagggattggtgtcattataaaagggtgagttcagcctcttgccctttgccttccactttgtgatgtcttccaccatgtgatgatgtagcaggaagaccctcaccagatgccagcactttgatattgggctcctctgtctccaaaactgtgagccaatacatttctgttcattacgtattacctagtctggggtagtctgtagcagcacaaaacagattaagacagagagaatatttaaccaaagtttcaggtaaaaagtcagtttttcctagaaactcttaagtattgttaacacagctagacaagggtatagcactgctttttacgtatttatcaaaattttcaaaaattggctggtcacagtggctcacgcctgcaatcccagcactttgggatgctgaggtgggtggatcacaaggtcaggagtttgagaccagcctggcaatatggtgaaaccccgtctctactaaaaatacaaaaattggccaggcgtggtgataggcgcctgtagtcccagctactcgggatgttgaggcaggagaattgcttgaacccgagaggtggaggttgcagtgagccgagatcacaccattgcactccagtctgggtgacagagcgagactccatctcaaaaaaaaaaaaaaaaaattataaaattaacatttaaagttctcaaaaattaaaaattacttctctgacaaatgggcacaaaactttaaaattttacccaggcagtatttaaattttttcctggatttcacttttaaaaatcttagctctttaaaagcaaacaaaagaaagtactcacattatgtcttctgcatcctccctttacactgattttataagtttatctcatccattatcattcattatctttctatcagttgtcaaatatttgttatgtgcctactatgttcccaaggctgctacattgaaggtactgttcttgtaatagtcctgaagggcacatatcatataaaacagttggaaaacaatattagcaaataatcaagtataacattgatacagtcatagcacccaggaattcagaggcaaatgtgtatgaggaccagattgattgggacagttttcatgaagaatgtggcactttcagtgatctttaaagaatgaacaagggtagagaagttcacgtctggtgttgggtaagcaacatagagggagaatggcagttcagattggaaaaattgtaaaataaagtatgatgcttatatccagtttgtgaagccctgactgagaaattttgacactcttgtcaatgtattatgcaattgagcctaagagtaagtccttggttgagaaataggatagattctatatttaagaaggattaactcaattcacgacttgagagactggcctttcaacaacacccatgccatggattcatcatctgcttttattgagatagtagtgaacaaaggctaaagaaaagtcagtaaattgaccaaagtcacatagttgggtatgtctgagctcaaatcctttccactccgtaatgcttcttcccttagcaatcctgaaaacatggacagttgtttgaagctacttgtctgctaaaaaagccacatattatccatttgcattagtagggctagagctcctgaaaagctagagctcctccaatcatatggtatatccacatgtcctctttccttcttcttcttatctcctctctggtcatcagttttccaagaataataatgaagcacacagtgtcatgagctgctaaggttttctttcctcttgctatgtccgaataatgattggaagatagaagcttgaagaaggggtggtgaattcctgagaaaggtagcaattgtctaataatgaggtcaacagagacaaaagcatctatggtaaaggggaagaaatgctaggcttgttattataagaaatggtctcatcttgtcacagccaccttaacactgtgtggctttgcgcatgttgtttaacctttttctgcttcagttttgtcatgtgcaaacatactaatggaccaattccaaatataaggaatagtaatataaatgaaagttcactagatatgtacaccaagcatcataaatgtttaaatatccatgtttatttcttattacaattttaaaagtaagtagttcaacttttgtaatcatctttgaaaaatatataaaacttcttatcacagaagtaagataggtttatagtgaaaaacagataagcaaaaagaaaaaaatacaaactattttctgtcctataatctggagatgaattacattttgttgcttatccttctgatctttagaaatggaaaatgcaaacagccagaaattagtcttataacttgctatatgtcatttaacataaatcatgaacatttttcacatcattatgaattcttccataacttaattttaatagacccaaagtttactcaaaaccatactattgaacttaggaattatttctgtaaattatttctctatttgcttataaataataatttttaaaaatcatctttgtagttaaatattggcatcatcctcattttaaaaaatacttttctaaaagtggaatcactttttcaaaatatatgcaaaaccaagacacttttgctagtaattgtcaaattgtgcactgtgtttgcagcactgcagttgaatgtcatgtactatacaacttacagggattaccatccacagggacagaaatataaatgcccgagcctagcagtaagcaacctgagtttacattcccatgagtggtacatgagagtttatttttttcctacctttctcagtgggttacatcctactgttttgatgttagcacttttatacatgaaaaaaaggtaattaatgggtaacaacattcatttattttattactaatgtggtttaacatttttccagttatttatctaaatttcttacacaaaattgctgatcataacccttgtacatttttatttcatctttttcttattgatttataagaactctttgtatattaaggttattaatctttcaaatatatgttgcaagtggtttcccagtttgtcatttgcctttgtgatattcttttataaccaaaacagtgagaaaaggtagaaagataagattttaaaatatataaaaaagaaagaaggaaggaaggaaggaaggagaaaagggaagatgaaaggacgaaaagtccgaaggtttaaaaatagaaagaaaagaagaaaccctttttaatgaaagagtgaggttaaaccaaaaactcaaaaatgaccttgattttaagcctatggacttcgcctcacagaaaaccattttatttctaattagattgtttctagttctcctcttcagacattttattattattattttttatttgttattatactttaagttctagggtacagtgcacaatgtgcaggtttgttacataggtatacatgtgccatgttggtttgctgtacccgtcaacttgtcatttaccttaggtatttctcctaacgctatccctcccccagcccccccaccccccaacaggccccagtgtgtgatgttcccctccctgtgtccatgtattctcattgttcaactcccatttatgagtgagaacatgcagcatttggttttctgtccttgtgatgttttgctgagaatgatggttttcagcttcatccatgtccctgcaaaggacatgaactcatcctttttttggctgcatagtattccatggtgtatatgtgccatattttctttatccagtctattattgatggacatttgggttggttccaagtctttgctatggtgaatagtgctgcaataaacatacgtgtgcatgtgtcttcatagtagcatgatttataatcctttgggtatatacccagtagtggggtggctgggtcaaatggtatttctagttctagatccttgaggaatcgccacactgccttccacaatggttgaactaatttacactcccaccaacagtgtaaaagcgttcctatttctccacatcctctccagcgtctgttgtttcctgactttttaatgatcaccattctaactggcatgagatggtatctcattgtggtttcaatttgcatttctctgatgaccagcaatgatgagcatttttaaatatgtttcagacgctttgtatacaaagcaatctgcttcctgatttaccaaatgtggtaggcggaaaaatgtcccccacaaagatgtctacaatctaaaccccagaccctgtgaatatgttaggtggcattgcaaagggggaaataagattggtggtggagttagggttgcagttagctgaccacaagataggaatgttatttgggattgattctagaggtggggtcaatgtcatcaagagagttcttaaaattgaaagaggaaagcagaagagggaaggcagaaggagctgtgactgtggaagaatgttcagagaactgcaccattgctggctttgaagatggaggaagagggccttgagctaaggaacatgggcatctctagaagctggaaaagcgaggaaacagattctttcctggagcctccagaaaggaaagcagcctagctgatatgttgattttagtctagttcaacccatttgggacttccaatgtacagaattgtaagataataagtttgtgttgttagtagaaatatgttacaacagtaatagaaaactaatacgccagtcatctatgaataagtgaaagaaacacaagagaaacttcttactcagtctgaattgtacattttccccccaaatgatacattcaatgtagagaaaaactagagtaaaagaattcagtattttctttaattatgaatgtttacaagtacatggcacatttatgtacttttaatgtgcagatcacattgatgtttagaattctgcaagacaagctctctataatgtaacataaatgagttaactgccttcttaggaaataggtgctaaccatttccacttgatgggcctcaaaagctgcaaacacattttgccttcaatgaaaatccagtgaagtgttgctgtaaccaagcaacctgaatgcaggaacaagcagccggcatagacagaaagcaatctgtcccttccaacggaggggagtgtgcagtgagtgtagcaaatgctgataaccagcagaactcatgaagacctgggaacatgagccttggctaagcagagtttgatctcattaggaagttctggtaaaacagacacaactaaatgctagttggagaagggagggaggatgttgtagtcatctttatagagaccgctgcagggtgcttttgaaaggcctttcaaacattctgggtagactggttttggttctttagttgaaaacattgaggcaaatgcaggggaaaaaaaagtctttttaggaataatatatcaataaaataattcttaagaaggcacagaagtaagagtaaagacaaaaataaacaatagggaaactaaaatttctgcaaactatattccactttatgtatgaacctgacttttattgtcagctacatgtcttttatatatatatatatatatatgtgtgtattttttttattacactgtaagttctagggtacatgtgcacaaagtgcaggtttgttacatatgtatacatgtgccatgtcggtgtgctgcacccattaactcgtcatttacattaagtatatctcctaatgctatccttccccctgcctcccacccaatagcaggccccagtgtgtgatgttcccttcctgtgtccaagtgttctcattgttcaattcccacctatgagtgagaatatgcagtgtttgtttttttgtccttgcgatagtttgctgagaatgatggtttccagcttcatccatgtccctacaaaggacataaactcatccttttttatggctgcatagtattccatggtgtatatgtaccacattttcttaatccagtctatcattgttggacatttgggttggttccaagtctttgctattgtgagtagtgccgcaataaacatatgtgtgcgtgtgtctttatagcagcatgatttatattcctttgggtatatacccagtaatgggatggctggatcaaatggtctttctagttctagatccctgaggagtcgccacactgtcttccacaatggttgaactagtttacagtcccaccaacagtgtaaaagcgttcctatttctccacgtcgtctccagcacctgttgtttcctgactttttaatgatcaccatactaactggggtgagatgatatctcattgtggttttgatttgcatttctctgatggccattgatgatgatcattttttcatgtgtctgttggtcagccacatgtctttgaagtgttgtctgtctccctcacttgctggtcactccataatccactgcaataacgtgactgtctctgccttcctactgcaaccatccttgttgaggttattagaacatttttgatggcttgagcatgggaactgaaaccattgcgtatttgatcacatgaccctttagagctcttctcactttggactgggcactctttatcctggcgactgctctgccatcttttctttctgaccgtcatctgtgtccatcccagccctctctggtgtacttgcttgcacacgtccatctccagctgggagtctctcaggcgtcttcaactgaacatatccaaaattaaattcaaaatctgtttctccactcctcaatcctcctcttcctaaatcccatatctctgtaactgatgctataatgtgcccagttgggcaagccagaagcagcagcatcaggcggtgccttttatttattgcttgatttataaagtaattagatttgagtgctcattttggccaaggatcagttgaaggaaaaaaaaaagttcccttttttttaaaagaacaacaaaatttctcctggctttatcaatcaccttcaaaaagtagatttagcaatttgttagatgcagtgagtccaggtattcaacttaatggcaggagtcctactcagggaggactctcccttatcggacattctttgcctgaagtttctgctttgtcaagtcctacaagaagtcatgaggataacgacctcttccctactacgtagaagccctaaacaaagctttatttttgctaataatatttcttttttctgcaaatccaaattgttcctagaagcttttggtaatgaaatattaaaaagatgaggagtgcacaagaagcctgtggtaagaaattaagctctaaggaagagaacttggaagcatgtgaaataaaaccacagcaggattatcgtaattgttctccttgacagacctgcccatatgtacggatgttcctgaaaatttgacaagggaattttatgatctatttcaggtgtctgtccatttttttcccttgggagtggagaggatgccgtaatagctcataagggtaacattccccttcataacaccctccttttctcatgccacccacagacctccttgaggctagtctccattcatgctcatgtctcctagccaatctaggaatcctggccatggaccatgataatcttgccactcagctgcatggtagctgagtgacttcaagcacataagaaagcatacagtatcttatgaaaagcataactgttcctcaaacccagcaaccatgtggcttgggcacctcttaccacattagtgttagtgagacatcacaagttagttcagttgaaatattggacatctactcttttgaaaggttcttcttcaacaggccaatattggtgctttggaccagtggctctcaaacttcagtgtgcatgagtgtcacctggagggtcctttccccagagctttggatgcaatagatcttgagtgggacctgagaatttgcatttctaacaagcgttcagatgatagtggtgctgctggtccagagagtacactttgataattaccttaaataaagttctacggggttttctttgcttgtttttgtttatttcacttccccaaaagactgtattaattatggtggctctaggtaatggagtaagacaaatctgaagtcattccaaaacccatagcatacttccttttccaaagaagtgtggactatttgctgttgggaaatgacaggtacctgctcagaagacaagtataataattaaaacaaaaatcattcacattaactctgtctccaataaaagaaggtgaaatcaatgttatagagctcaaagtaggttagacatttccttatgaaggggattctgaagtatataaagctagcttttacccaaaacttgttattcatgagaaactagttggttttcacatatattttgtgatcaaaataagaacttcggtcatattcatgtgtttgtgtagaatgcaacagggtaatctaacacaggagatacagtgaacaaaaacagcgtctattatgaaattaacatcaaagaggtcccgtaagattaaatggagctttagcctctgtatggtctgtgcctgggaaggaaaggggatttttctggaattggcatttctgaacacacagaacaatgccgtctgattgattgctctctatttagaaatagtatttctatcactttggtagaaaccttttatttcatttttgtcctctaacaaagaagtatgatgcttggagaactgtttaaaagggctgcaactctgtgcccatgcttcatcagtctcctaactactttcaaactttgagtggcatgactccctacttccatagactatcacctttttttaatatttttttgttcctagttttgttagaaaaattcttgctagcaatttgttgcacaaatatgactcaagcaagcacattacatagaataatgttgaactaaagtagatttcattaatatgtaatggcacattaggtgctttgtagagcaaaaggactctgtgcttgattttaatacaaataattgcaaaatattaaggcatgtgctttataattttcagtaaatttgtctcataaaaagttatctttcaaaagatggtatgtcactcctctgctcaaagttgtttaatcactctacaatttttcaaaaaaagtttgaatgcttcaaccttgtatattagtcaggtttttgcagagaaaatgaacatatattaaaatacatggaaagaggtttatcatagcaaatggcccatatgattatgaaggctgttaagtcccaagatctgcagttggcaagtgtgagacccaggagagctcatggcatagtttcagtctgagttcaaaggcctgagaaccaatggaaccaaccgtgtagttgtagtctgaatgctggcaggcttcagacccaagaagaattaatgtttcagtttgaatctgaaggcaggaaaaaaaccccaatggccaactagtagaaaggcaatgaggccggaggagttccctcttactctccaggggtcagcctttgtgttcttgttagaccttcaactgattggatgaggctcactcacatcagggagggcagtctgctccgtacccattcaaattttaatctcattcagaaacactcacagacacacccagaataatgtttgaccaaatgtttgagcactctggaccagtcaccttgacacataaaattaaccatcactcctggcatggaaggtctgtattatctagccagaacagatcgggttagttgcaatttctcagataactcttcctttggccattcatagctagttttatttccttaaaaacatcttgatgattcacgtccacatgtttttacagatgtttttccctctgcttgagtgtgattacccttgtctttgtttgagttccccaataagcagatcctgaaacaaggactgaagtagaagtatgttggggcggcgggggtgtggcagggagatgatcccaggaaacaccagtagggaagtggggaagtgagacaagcaagagcagtaggcagtgaggttaagctctaagccagttaccactggacaactggggctcaatcccagtaggagtgaggagactcagggagatagtacagaacatgctttgaattaggccacttgggaagcaagggatctggggtacttatatgcaaattgtccatcatttgagaaaggctcaaccctaaagggtgttaattctctagtattacttgaatgggattcagcaagcagagagagccctcaggcaaagagacccaggagctggtggctcaaaggcaggctggcatgcactgaattgtcaaggaacaaggagttataggcaggacatccacatctaggcatctactgtagcctttctttttccctacataactttaactcactctttaagactcagctgaagtcttgcctcttctggaatgccttcatagaccttctctctgactgagctggctcttgtatatttcccaatacaacttctgtttacctccatcagataatctgttaccttcttctctgttgttttgcttttctatatcgtccactttgtgacctccttgagggaaaagattgctaacctgtatcttcgtaatgggtacacaaggtagagctcaagaaatggttatttgactagcaaaaatagttataaaaatgacattataatgtaatcactcaatgggttattcttgcccactgcacagataaaactaattcagtgagacagcagtattgcagtagagaaagagtttaatgcagggctagccaagcagaggacagaagtttattactcaaatcagtctcccaaaaagcttggaggctacgagttttatggacaacaggcaggggtctagggatagggtgctgctgattggttggggatgaaatcacaggagtgtggaaaactgtcctcatgcactaagtcagcctctggatacgggccacaggaccagttgagtaatgaggcaaaggtcccagtggagtcagtcagttgccagaatgcaaaagtctgaaaaacatctcagaagtccaaccttaggttctagaatagtgaagttatctattagagcaattgtagaggttacatgtcttgggacctctagaacaatggctggttattgtttaaatgtgcctacgtcttagtagaatccaggcttctctcataatcatgaccttggggcctttcgttagttttacaaaggcagcttcagtcctcaaacaaggaagggatagttttgagaagggctattatcattcttgcttttaggttaaactataaactaaattccttccaaagttggcttgggctatacccagaaatgaacaagaacatcttgtgaggttagaagcaagatggagtctgctgtgtcaaatttctttcattgttatactttttctatgtcagatttctctcattgtcacaatttttgcaaaggtagtctcagtaatagcaataatcagtatttattgaatgctcattctgtgtaagcacttgacatataatcctaaccctaagaagttgataattttattatccctatttttcagatgaagaaactgacatataggttatatgttacttggaggccaaaagataacttcccctttgccctctgaaagttcactaaaagtaagctgacaaaaggcaggttaatagcagaaaaatcatacaaaattattttaacatgcataagcatgggagaatcgcatgagaatgattatccactagctaaattgggcacagaagcttatctcttcttcttcataggggagtggacagatggggaaagtagacaattttttgaggagcaataaataattattagggagaatgaatggacccaggagacagaaattaacttgtaaattattctctttggaatttgaatgagcccaagaggcaggcattatcttgtgaaaaacatctgtccaggtgtggttacattctcagctttcttttctgcaatagataatgagatttcaggcagaggatggaagacaattgtgttccttttttggggctactgtttctagatagataagggaactgcagagaaaatcttcaccctgtgctttgggagagacaagggattgagagacggtagtgaggggaaggtccctcatatttcagggtgaaatattctggtattcttcttacccaagatttgcatagttatatgtggtttgtcctggaagtaaaccgaaccagtctgagtccagactctggacagactcttaaccactgtatgactaaatcagtgcgtgaatgaagtgaatgaatgaataataaccccaagcctgatccttccacacatgggagtcattctggggatgacgttatcaggacagtctatgtagttcaaatatcagcttcagtgttatgttctacatacaagaagacttccaagtagcttaactagaagtatcaatccttcctctgacactttttaatagcattgactaccatatgttggaatgtatttgcatgtcttggtttctttactactgacaagattcttaaaaaaaaaaacaaacaaacaaaacaaaaaaaactgcttaagtttctatccatcttggtgttttctacagccccaaacataaagccttgtacacaataggctaaccaatgagtgtttgccaggtgaataacggaaatataagtgacaagcaaagggatctttgactcttcctttatttttccccagaaactgtagagactcttttttatctctctctctgagattccagagagtctgttgtcatacagattttagatggctctgtaaaataaaattatatttaaagatgttaagttcagggaagaatctatgaagtttactttgtaacattttggtaatcatttggttagaaaattatatttctaagaaattggtattcttccttccaaaactgcattcatagaatgaattttaaaaattatgtagaaaatcatcagtgtttctaaaatatttccatggtaaaaaaattacttctttaaaagttaaccatagttatcaagaattgcctttctaaaacctcaaatgaaaggcattttctctttcctctgactaataaatctctaatcatcattaataattaataatcaattcttagaagaggggcagactgagtaaatttggctgggatgactaaattacaaagcacatatataggagaaagttgtaaatcttcactgacttcccattatttacaaagtatcatatagctaatatgtataaaacacatagaaaataatataaatttaattcagtggacatttattgattctagtatataaaatgaatggcattaagtgccaaggaatatacaggaacagaagacctggtctccatctttacagaatttatgatctggagaccgatgtttgaaagagagataaaataacaagtagactgtgtgattttattataataacagctaatatttagcacttaacaatgtttcagtagctgtcctagtgctttacgtggcattatctcatttaaaccttaggaaagctctatgtagtaggcattattattatcccactatacagctgatgaacctgaagctcaggaagatcaaggtaacttctccaagatcacatgcccaggggatggatggatggaggagccaggatgcaaacctaagcccatgtgtatttaaagtccataccaagcaggcagcaaaaataaggtacatcaaagagcacatgattcattcaaacctggggaaatcagaagctatggcacctaagcttgcacttgaaggatgaaggtgaatagagagggagaagggcattgctagcaggaccaaggcaggtagacgaggctgagggagaccttgagagatcagagaagagttaagtgttgccatccatgtgggtggtagcatgcatgtaacagaggaggtgaaactgagaaaagtgtttggaaccaggtatcattggccttgagtgttatcgggaagagtctagacttttctcattaggcagagggcagtcactgaactgttgtgaaccagatcagagctgtattttaagactgatttggcagtcacgtgtaaaaggagtgagatacaggagagagaaaaagagaggagcagttaggaaactgctaaaatagctaaggcaaatggcactgggagtctgaatttgtactgcaataatgtgaggagagaggaccaaacatagaaacaggagaagatttggcgctagctgatattttagtccatttgggctgctgtaacaaaatatcatagactcagtggcttacaaacaaaagaaatttatttctgacagttctggaggctggaagtccaagatcaaggtgctggcagattcggtgtctggtgaggtccctcttcctgtagagagccatcttcttcctgtgtccatgcatggaggaaggggtgagaggtctctcttaggtctcttttataaagacactaatcccatccacagggctcctttcttatgatctaatcaacttccaaaggcctcaccttctaatcaccatcaccttggaggttaagattaagcatatgaattttggggggatacagatattcagaacatagcactggttgtggggagcataaggagagagacgacaatgtgtcagaagttcaaaagagcaagcgtgtcatctatagtgcagaggaatcacatgtccttgtccagttaaaagggattatactgggagatgatgggagctaaatgggagtggtgcaattggtgggacacttgaaagcacatgagtgaaggctgggatttccaaatgcagcaaagcagcactttccatggtgtggtgcggggatttgacatgtgtcggtctatgaccaaataatgatgtccatacttctcagatacttgaagtgagcatgcagacctttaacaaagttagaacatgtggcatttaaagtctgtgatttttaattttgagcaattgaaatgactgaagtgaccatatataatttctataagtaaaacaaacgattgcatatacagttataaatataacaatttttaaaaggaaatgtaaactctaggctttaaattgtgcattaatgtgtatactttcttcttaacttagcatgataataataagacaacagaaatgcatgttttaacagtctgttttctactgatctgttatccctttctttgattttttttaataatccatctggaacattcttgtgtttcccactttcatataagtatttctttatgttttcctattttttaacagacgataataatgaagaagaagaggatgttgaaatgaaagaagattcaggtattaaattcatacttttattattagggggtaggtaggggtcattttgttgtttatgtacacttcatattttttcaacgaaagacaaaataagattaataaaatagaaatatatgctcagtgttataaaattaaaaagtagttgttctaacacttaaggctattgcagttgctgtatttaaggaataaatttgaccttgagtttcctgacagcgaaggtaaaaatggaacatgatgttgtggttaatacagttatataacgaatcacccccaaaacttagagtaagctgaaaacaaccacttcttacgctcatgagcatagcagagataacttaatcatcctgttcacaaggtttggagctcagcaggaagattcaacagctggaagctgggaccatctgaagattcactcacttgtctgtctagtgattgatctcaactgtcagctaaaatcttagctgggacaacttcctaaaacacttgttcatggccacctttatgtggcctgggcttcctcaaagcatggcggccagcttccaaaatgagcttctcctggaaaaagggagacactgtattctcaggcttagacattccattgcatcactccatgtaattcattctttggaatagtcacaagcctgccaaaattcaagaggaaatgaaaatgaactcaatctgttttggggagtggttctatagagcgtgtaagacctaaaatattgctgtggccatctttggaaaatacactttccacatactatattttgctctcattatcagaattgagatgcatgccaactcctcaacaaagcccacttgttatgaggaaaatctagtagttaaatgcacaggttatggcctaaggtagccattcagtgtgtctttgataataaaggcataaatcagtagacctgaattcacttgtagctctatcaattattgaccttaggcaaatgtcattttctataagctgagtttacaattctgggggcaataattcttaccatatagttttctttggaggattaaatcagataacatacctaaagtttcatacagtgcttggaccatagtaaagattcagtaaattattgcttttttctttctcattctaacagatattagaaggatatagagcttaagtctatgattaaaagctccttcttcctcattttggcagtcacagtgttctgaccatgaaagaggtatctcagaggccctgattttgtgttgcttctcatttgatgccagaattccctacaaatcactgacaggctcagtctgggcagctccatcagcagggagctctttaaattctgatgcatttgatctcaatacataaggtttgatcggtgtggtccttctctatgttaagttatatctctctccctccccggactgcccactatcttcaaggggaaataacaccagtttattttcttcataaaagttcattggaacaaggattatagcttctatctactcttctccagtccaaacatgtctgattcctaaggtttccttggacttccaaatgcaatggattcagagggcatgagaagcagaagcagaatctaaaagtcaggagcaggaataaaggaggtagaagaggaactgtagcagtggctgttggtgccctacttatgtctccttggtgcttgctgttattttatagcaccaacagctttccaaagaaagtccttatgactctctgctgagcgctttacttgtcctggcagcaaactcaaagcaccagagaattaatttctctggagcagacctcaaccaataacagacaggaattggttggttaatacccacatctgactcatgttctattctaatgctgtctagtagaaacataatgtgagcctcaaatgtgagcctaatgtataattttagattttctagtagccacattgaacaaagtgaaaggaagaacgtaagactaactttaacaatattttgtataacacaataatccaaaacattatcatttcaatgtataatcaatataaaaatagtcggatattttacattcttcttttttcatactaagactttgaaattggtgtgtgttttacatacacgttccagttcaaactagccacatttcaactacttgttggccatacgtggctagtggctacagtattggacaacactgtttggaggtccccgatagaactgagtcttggttgcccacagtggaatgtgctcatgaacacacccagtattggctgctttccttttcctgtctttcttccctactcctcttgtgatacttactaaaatcatctctcaaattaactgcttaaaactcaaacccttctatgtttacttctgagagaataagacctaagacaaggactttgcttgccttttataaaacatagagctcaaggtaaaatttaaattaaaatttccattcctatacccatgtagaatgtcttattgttaaaaagaaccatatgtttaaaaaagacttgaaattgtcactctgtcttgaattaactttcatgaagttaatcttaatgcttgccattctcatttatcctgctcacatgaaatgtccttggagtatcttttagctatgaggggtactgccctttcaagcacccggtataagggccttatctcgccatggatcatttgcctaagtgctgtaagtacacatttctaagcaaagagagttggcttctcaatgagatttagatagctatccaaaccactgaatgattttaaggaaatcattattaatgctaatgcagagtccccaagtttggagtcagcatttgaggttcagcggcattaattggatcaccatttctgattttagttccaccaggtttcctgggagttttgtcaccagcagctgcatgcagctgttcaagtcatattcaatggcccaaggatgctaagccacttgggcagaatgggcttgggagctactcccaatttcctatacctgagtgctgaaatcatggaggatttttgtgctgaatggttccagctggcctcaccagacattggtgtgcatgctggcttcattcagatctcacacttaagcatgtcagtctcgaagatgagtctaaaccagcctcccaaggcctttaactgctgcctttcccccgccctgcatcaattcttctcattcaaatagaaaagctggagggatttttacaaatgcaaccgacactaatgaagggctacttgagtgaatcaactggccaagacatgctagtgaatgatagtaaataacaacttgaatacctaaacccactggggtgcttgtaaattaactctctgggtaagaagagccccagtgtgaagagtttgcagatttctatggtataaacacaaataccatggtctttttcaagcttccaaagcatgaggtcaatgaataggagagctagggagagatggtacaattagctcgtgtgagctggctcaagtcagccgcagcacagctctgctgagccagactttaattgggcatgtactttgtgccaataacgtgacatgcatgaactcatttaataaacacagcaattctacaaggcaggaactgttattattgaggcttaaaagggattagttccttgcttaaatagcagagccagaatttgaacctgagtttgcctgaccccaaaattcatgtcctttacttttttgctcctgtctccagacttttatagtaagtagaggcaggagcatttcagatggtatcagacatggtcatctgcaaggggaggctctactcccatgggaggtagaagaagcagactggcctaaatgcctagaattccttgtaagtcctttaatcatcttccttaatccttaattccttaatggcaaatgttttcccatgtcctttcatttccatgactatgcactgttgaaattagccccagtctgagccagcagggacagaaaattatcaaccacctatggaaactcaaccacatcacagctggatgcacagttgagtccctcaggggacaaagccatgctcctggcaaatctccaggtttccaccctctgccagacacagggcaagctagaaaacatgatacattgtcaaggagaagcatgggggtgcttttgaagagaagcagaagcaactctcttcttcactccctcaggccaagagggaaagttgttcctcccaagccacaagtagaaacttgggcacagaggccatatgtatctgtgactttcatttgcatgccccaaaacacttcacctgtggtatcatgaaatgatacaatactgtttcacagaacatgtttcatgttcatattcaacatgtaagcatgcccactgacccaaggagtgctctacaactttttcaaaaataaaatattagtactttagggggtgcttagatatttcaaaatgtggcacatggaagtctttttaaatagtacccactccccaggaattcccattctggtggaaaatgaagacctagaaatgtaactcacaaaaatgcaaaaagtgatttggagaaatgctggtttggagttgaattttcagcattggaaactctcttcttgatcccagttgcagacgacacattgcagtgacatagaagggttagatttttctcccagtgaggttgcaaatgtccctttgcccattgtatgaatccctttgagcccagtatttgcactcggtgagctgctccaagcatctcatttctgtttttgctgaacccattccaagggtcaacatccatcttgcacctggtgacagaagtttgggggagttgctaatgtagtcattggcaaaatttttcaccctggctgtggtaataaccttagatgtgactgacttgcaaccacagaaaacctagcctagtgcccaaagctttgcagtttataatgccaaagtttttaatagcacatctatcaaatgtggggtttttttttgttctgttccttttttaataaatgggaaatgagaaatgagtcgccatagctctgtaatgtaattttagaatcctggcacgaaggcgacagctgctaagagagaattaggcagggtccccattatatcttggccttaaagaaagggctggggaagtgaaaataaaatagaatttgaaatgaaattctcaaggcactgctaggcaccagggatacaagagggattaggaaagacaagtgcccttttctcatggaatttatgttcttggggatgaggtgaggaaggagacatacaataaagggatacaccagagagtgagataatttcacatacaagtgatgtgtttgagagagatttcctttctggtgagcctttagattaggcagtcagggaagatcttctagggagttgaatttgatctgagattcaaagggtgagaagggagcagacatatgaatatgtgtgttggaggagtgggggtgagaacagcaggtgcaaaggttctgaggcaggaaccagcctagcagtgattgaggaacacaaagggaaaggaaactgacaaagctagagccaaacacaagagggaggtgaggctagtgtggtaagcggggccccaatgacatgctgtgctaggcctggaattggatttggatcttattctaagcaatggtttttaaacaggtgagcaatgtgatctggtttatgtttcaaaagctcacactggctgctgtgttgaggatagagtgtagagagtaaagagtagaagcagggagattagaaggctagagggttatgagatgctggtctgggctactgtggtgattccaaaggttgaacacagtagatgaatatgaaatctattttagaatggagctgatagggcttatgatagaacttacgattgcttcaactggaaaagtaaatgaagaaaaatattgagaatgacatctcagtttggagtttaaatttctgggtagatagtaataccattccttgagatgtgcaatactgtggaaagaacatgcttataaacatcaagtatatgattctgtctgatttcaaatttgaaatgcctgatgaggtcctttacaaaaaaattgaaagggcctgatgggagttgagtgcaggaaaggaaattattagtgctgtgaagtgtggggcatagttaagtaccagccctgaagggacaatgggaaggaggtggctacgggagccaagaaacttagagggccacatggagaaggccaactctaagatctgtaaccttcgattgagggatacaaccagctcatgaaaaccaccaggtgcctagaaagtaaatgccctgagctccccactggctacatgaaccagggagttcattcatgcaatccagaaaattcagcctcccagagcacagcaggggtggtgaaggtggagagtggatctagaggggcaaacagatatccattcctaaatcccagacaagatgccacgtaggctgttgaagatgtaagtcatgagctcaataggaagaccagggctaaatacataaattaacacctaatgaagtgttctatatccaaatgaaataaactcggagatgctttcctgacactgtcctcagactttaatttatttgcccccaaggatagacttagagggacattgaggaaaataggaagcacagtaatttaactgggacatacagaagttgtttagaatctggattactaaaaacagtttgttaaatagaagcagggtaatttctagccccattcctttctccattcctctagccctgcgttcaggactgagtaagatgaaattgcacaatgacaattgtcaattaatctatgaagattgaaatcgaacactcttggaggaaaaaatattaacagggttcccttatggagaatttctaaatttataaaagcacatgtgtaagattttacatttgtgtgaatcactaatgttatctacaaaaatgttttagcttaagccttaagtttaagtctatgtaggttggagaaccacaagtccttgccagaatttcgctcagccatgatgacagatgaaactgcaattaagattcagcgtgtgtgtaggtttactaagaagaaaacatttttaaatttcacataattttgaaccctactggtaaatatttaaatgagaatattaaatcttcgtgattccagaggggttagagccaaaaggcctctctccaccctacaaaaagagcaaagcaaagaagccagaatgttcgaaagactctagcgagggtaagtcctgtccctccttcctttagaaaattatgccatgaaaagaaacatatttaatttttaaattatgtgtacaaacacactcatgttcagatattcctaagggttaaaatatcacagagaaattcttttatccctttctaatatgtttgaagatgaagaatcagactcaagtttattttgttaaggtaaaacccaaattttaaaagtccattttgtcagtatgttgtattttccatgtctgcaaagcaaaaaattgtaggtagtgcttaccagttacatgttccaaaattgtgcaaaagtgaaggtcaagatttgcatgtgatgaccagctttgcagctattgtcttactggggaaattgtttttctgataaatacattctgagtctttccagattcggacctcaacaacagatgctggaaatggttcctgtctttagcattgtctttcattttctaagatcctacatacctttgcatttttgcattgaatgggcaggtcccactggactcagttttatgaataaatgacacggtctctcttttacacactagtacaacatacaattcattcaaattttcttttgaaatgttgatgagatgttcttttcatgtgaacctcaaacctaagagtagtacaaacttttacacttgatcttagcccaaagacccagaagcgatagagcagtacaaaattttaaagggagcatatttacgctttgtctttcttgcctggatccccacctcctccactgggaaatgaagagtgtaataatactgatggtgtcaggttgggtcttgagggaagaagatgccaagatggaagcagaagtgcaggataaaggtgagagaaatgggcaatggagcaggagcagctgaaaggagagaagaaaagaaggaggctcagctaggaagtgcctcagtctgcagtgcagtctggaagtctggaggagtcctgcactgggcaggaatagctgggctctagggtctcgctttcccatgctcagtcactggctgcaagtagtttggcaagaaagtggccggcctcagcaggaacatgatgccacaggggttctcaacagtgtggttgctgggtgctgtcagcttacttctctcctagcagcaggtctcacttgaaaagaactcttgagctgctcacatgcaggactgcacagtatccctgttgagtgccggggcttccggtgctaagtaatgacgctgctttttcaccttcctgggagttcagaaccaatcgagaagccaaagctgaaagaaaggtggaaatcaaagcattagcttgaatactaacatgatgaggccagagcatctggctgccctgctcctagacaggcttcctaaccctgaatttcagctctaaataggaaagctttaatcactgtcccctcacaggcgagtgcaggtgtcctcagcttcctagaccaagactgccctgatcagcttgttataggatgagcagaccaggaacacgccttctctgtaggcaggtgggtctgagagagacacaagatggaactgtttccttctcccaggcttactgtaagaaaggagaggtgcagaaaggcacagaaacagatgtgacccctcctctacacaaggagcaaaggaggaatatttcctactgacaatgaagagtagaaatagcatgtgtactggcctagcactggcctggccttctgtcagtgatggctgttgttatcaatatgatgatcatggccatcgtagattatgcactgccctaattcagtgaaatgtgcttgaaagtttaaaatcgttcagaggagaacacttagaaccaggaaaaaggccagctgcaataattcacccaagatgttaagctttgttactgcctggttgggagagtagctggggcttccaaatctcctgttgtagttcggtcattttctagaccatctcttaaggccacacttgggtaatgagctggggcaaagcaatactcacctttcccctagagaaactctacctcaccaaatgattcccatcacatccataacctatgtcaaaagttgttttccagaacctgagcctgttgtcatttctgagcctcatataacagctattaagctgtagcagttcttccgcctttaattaaagaagggaattcttccaagttactccttccaatgtgtgaaaacttcatttacttcctaaatcagttgctttgtttaggaacatcattcccgaatcctaatatgactcaataatacagcttcacctcctgtaattatgtggtctaacaatctgctctgaatcataaagatgaaaatgtggtaactggatttgctagcagggacattctgtctgtggtgaaatgtgaatgtgaggcactctccagaaacataggaattgttcatttgttcctaagagggcttcaaagacaaataaaaagtaaagatagctgggcaaggagtgagaaagggagcgccatccggcaggcagcggtggatgattccatgatatgctgttgtgctgaaaccctcccaactttagaggggatgacaccaggttcgagaggctgaagaagagccccagaatcactgaaagagacatggggttttcctgggggctttcatacaggagagagggcctggtggcggcagcctgggcaggaggaccacagccgcttataaaaaacatgcaatggcaacctttacttaccccaagacaaagggcctccatcccttgtacagcctgagttccacaggatgggccgggggctcagatgttccctgtagataaggaatcaatctccgggttgccactcctggattctagttgagaactttgaaccgcattgaggtgcatccaccacatggttcattctcaggatatggttaagtgattgctatcagctgggtttaccacacatacggcacttattacttatcagagtttctattttgacaaaataacctatgtctctgaattcatgcattgtactcttgcatgtgttccatttcctgttatgatacaaagagttacaatcattctttcctagtggatatgcaaatgaaatctggtatcactggaagagggacaaattttaatgctgatcattactctcctctctagatcttcttcccagcttagagttatcaatgtttttttagcttggtcatttcatatttttttagaaagagaagctcctggtatttttatttatagatctctcagcttaatgccccaacacttggccccatctctcttttctccttctttagggttccctggcccacttcccaccctcacaggtactactgatttccaccttttaactgataatgcacattttcagaaagggttgtagaaaacaaactcacctagattttccagcatatatagtcataataactgtatttagattcagaagaaaaatttcaagaacatatggtcaaattttctcattctacagaatttttttaaagtacagactgcaaatgcttctttaacttgcccaagtccacgcagtttgttaatgtcacaatcttttttttttttttctagaaaaaacacagcttctgtaatcttttctctttctctttcctggaaattagaacaaattttttgaaggaagaaatattgtcaacattataaccttgagtgaagcattattactttagtaaatatctcgctaagatactgaacatcaaaattaaaaatcaaacaacttctaaatgtatttatttgcatttttatgctgtgtacttttgaatatagtgattttattatttttagtaaaatttcatgaactgctgtgtactttggtttcacacactcaacaccataccaataatgaaattattagtaatttcaagttactaattgattggctgtcatgtgctataaatgataatgccatctgtgaaccagcaaggcatagacagaattgtttggaaaaaagcctgattagtaccagttgcattaattctaactccccataatttagacctttttttttcttacaaaaagttgaaagaatattattgtagaaaacttagcacctttaataaagcatacttttctcacacttcttcctttgtctttcagaagtaaattatctacaggttcctttagtgaaagtctctcaggccttatttgtctgaaaatggtattattttgcattattttcttaaagcagtattggtgggtaaaaatttgagattgatggttattttcttgcaacattttgaagttttcctgtagttgttaaggaatatttccgtttgttttttgcttcttttaagcttatctgtttttcctttctgtctgttttgacaatctactcattaccttttgtgttccatagtatcactatgatgtgcctaggtatagattcatttttatatatccttcttagaatttgctgtacttcttggatctcggaatgggcatctttcattagttctgaaaaattctcacgtatcactgcaccaaatataacttctaatctattactttctattctttctttctctgttcttcatgacttttaacccatatcgcattttgtcctctgtatctcttctctctctgatgccttccggttaatttttttcaagtctgtcatttaacttgctaattttctattcaactttatttaatctgatgtttaactcttcactgtatttctaatatagttttcttttttgataggttttatttggttccttttcaaatatacatggccattttttatttaattaacacataaaatacctttaataatctgcatcataaatttaatatctctagtctgtacaagtctgattctgcagtttattgattctgcaaacttctgcacttggttatttcctcgtgtattttgcctttttgatgatcatgttccttggatttttacttatggaagcttttttgatgttgctttaagagctcatttatttacacttggttttctaagatacctgaagatattaccttagcaataccttaaagtacatatttggcttagagttttgtttttattttgttggctaatggtccttaaacccatgttagtccatgtataagatgaggaaatctcaacagagacctttttttcccttttttctcacgaccaatgctaaaactgacataggcaaatctcccactatatttatgaccctagcatgggcccctccatgcctcacacgtgtggctcattcaaatccaagctctagctagtggttctcaaagagtgttcttgaatctgcatccatcagcttcacctggaagctcatgcctataatcccagcactttgggagcccgaggcgggtggatcacttgaggtcaggagttccagaccaacctggccaacatggtgaaacccccgtctctactaaaaatacaaaaattagctgggagtggtgacatgtgcctgtaatcccagttactaaggaggctgaggcatcagaattgcttgaacctgggaggcggaggttgcagtgagctgaaatcaagccactgcactccagcctgggccacagagcaagactcagtctaaaaaaaaaaaaaaaaaaaaacaaattctaggttcacgtcccagaccttctgaatcagaaacctgaagtggggtcctgtaatctgtgttctcaaaagctcttcatctgaagatgcacgctcaaacttgagaactgttgttcttgagtctaggttacctggggttggcagatgcctcaaagcaaatactgatttcagtgcctgcttagaactcttgatcctggcactttatcatttcggtttcaagaatttcccttacaaaagcaccagctcagccatgtattcaagaagtagatagatagatgcatacatatatatgtaaatatatatagatagcacatacctactatatatatatatgcacacacacatatagtatgtatatgtgtataccttatatgtatatatgtatacacatacctatatgtgtgtgtgcatatatatatgtgtgtaggtatgtgctatctattgtatgtatgtatatatatgtacacatgtatgtatatacatgcatatatgtgtgtgcacatatatatctgtaggtgtgtgctatctatatgtatgtatatatgtatgtatgcacatacaaatatatgggtgtatatatatctgtaggtatgtgctatgtatatgtatgtatgcatctatttacttatctaatcacacagacatatatgtatatatgtatatgtgtgtatatgtacacacgtgtatatatgtatctttacatacatacagatatatacacatatgtgtgtacatatatacatatatacatatacatgtatatctatacacatacatacatttctaatacatagcctggaaagatacatatcaagttgacctcagaaattatcttggaggagtgaagaaggagcacagttgggttttggagagtttaatattgcactttctaaatttatgtgtaattgaatatgcatacacacatataatgagttattttataaaacaaacacatattttcattaaacaagaactaaatggactatatgttgctaagttcagtagcatgtttcaaacagtaattttctacatacctgagtctccaaagccttcagtggcttttggtaacaaatggcactttccatcatatttttacagaaagcactagcactttgactcttgctccacaattgcctttacatagaatattcagtaggcatacgtgggatgctcattcatcaggaaactgaacccttgcaattctaaatcaagcaaacctatattgcactttaaaatattaatgatgtcttttgtcagatgaaattatatgtggaaacattttggaaactagaaagcactatgccagtttgagggatctaatgataatattaaagttattattattattattttactaaaataaatttttctgaatacatgaaccatttatggaacgtagcttgtatttcccgagaggcagaattttctctctgccccattattttctatgcatattaaagtatcgtgtgacatgctgttttgtgagtggctggacagaagggacattctatctttcagaatgccatgcagcagttcatgcattatattcataagcacgatttttaatttaatttttttgacaagtgcagtgaagggtaaaatcaggcagtcataatttttactttgccatcactcaaatgagcttagtgattgaccagcttttaacaaaataaggatccaggaaaagcagctttcccctgaagaaaagctttgttttatcctctagactttaaaatatcaagaatttaagcaaaatgtgtaaatttccatggtgaaaaatcagaatacaataaatgcctataccaccattttgctttaatcatatttttcttatattctgcttgattccaggccattctgaactatccaccaccacaaagtagtagaaggacccagtggtctattttcatttgtactggtgctccccatgcttacccattaaacagaccacagagtcctgtttcagagtcagctctaggactttaaatgggacttagagaatgtgagtattaaggcattttccattgtgagaagggctgaatctaccaaggcagagaaaccacaggttctgtttgactgggaacgatcccaatttatgcatgttgccattggcatttgttagcaatgttccctttcactcttggaggtaacccaagtttggtgataacatatatggaccctcatacccatagagaaacagttcagtatgagtatggacagaactctcaattgtccatgttctgcttcctacttgggcagtttttctaacctaagactcagtttcttcatacattaaatggacagaagggaaactgatcttgcaggactgcagggcaatttaaataagatgatttatggaaaacaccgggcacattgagtagacagaagagctggtcagtgagtatattgaatttgaaacaagaagagctccctcccaccaaagactcccctaccttgcttattaatgcttgaaattccttttaatgtgaacaaaatacttttgcaagcagagatacatttttaaatgcattgcttgcatcgcacatctagctgggtttgtctctctcctttttcccttaggttcactcagcacactctgcatgcctccccaccccagcccccagttgcactaattccagtcccaaagggactttcttccagtctgtcttcatcttcctgatctctattccccttatcttcaagtccagattcccaagaaactacagaaggtccaccatttacaatggtttgatttaggattttttgacttgatggtgtgaaagcaataggcattcagtagaaatctttggttttgaattttgatgttctcctggactctcgatgtgatagtctttcatgatgctgtgcagtgagccacagcccccagtcagccgcaccatcacgacggtaaacaactgataccgcactctagagtggcctgtgttgtcagcagtttttggatattgttttgtgttttcacatttcatcatgtctacaaaatgcccatctgtgcaagttaggtgtattaaatgcatttttgcttacagtattttcaacctacaatgggtttatcaggacatagccccatcttaagtcaaggagcatcagcagcctatctccaatatttacacaaccacacatctcaaccatttctcaatctctacttaactgtctctaaaactttaaggagggtaccagattaggtcaggggcatgaggaaagaggtggtctctagttatcggccctcagttcagagcttgccactgagacagtcattgtttggtcctcatggtcccttgagatctgttgactctcagctatttctgtaagattctgggaccaagaatctctcttctgaggctgggctattcttactgcctgtagtcttctttccctgataagtgtttctcaaaatatggccaatggaaccctgggggaggtcccccaaagcccttccagcgatccacaaggtcaaaattagttttgcatggagctgtgctcccagaagtctccactcacatggaattcagtgtgcatgaggtcctctatagttgtgcaaaatgatgctactgcagaaacatccactgcatcctccaaccacatcagcatagctgcccaccatccagtttctccaagcactcattccacatacttttgttaatgcctaccatttgacggtgtaggtattgttctaagccctgaacacaatataatatataatatatgtattaatatattataagcccctgctttcttggggcttatattctatatataaaatagaggcctctactctcttggggcttttattctagggtatgtggcattggggattggcagataaaaaatggatacaatgtttaataaattatttatctattgctgcctgaaaatttatcctaaagcttcaaccaacgataagcaattattatctcggagtttctgtcagtcaggaattggacagtagcatatcttgaggttctgggccaccatatctcatgctaatgtgtgacagtttaggtcacaaaagatggcttctaccttgcgccctctcggatcacttgctctggggtaaggcagccgccatgtatgaggaccccagctctgtgaaaaggttctcatggcaaggagctgaggccccctgctggcagccggcgccaagatataagtcatgtgagtgaaccgtcttggagtcagatcctccagtcccaagaaagcccccagatgactgcagacgtagctgacattgtgacaacaacttcatgggagacgtcatgccaagagccatggagaaaaatcaagcaggggaggagctaggaaatgcccaagtgtgtatgagtgtgggagtgagcctgtgtgtgtggtgggggaaattaggagacagctgggttgggttttaaaatatgttagatctctctgattattaagtttctatttgagaagaaacctgaaaagcataaaggggtaagccaggcagctctctgggaaaagagtgttccagtagaggaaacagtaagtgggccgggtgcggtgtctcacgcctgtattccaagccctttgagaggccgaggcgggcagatcactcgaggtcaggagttcgaggctaaaaatacaaatactagccagacgtagtggcgcacgcctgtaattccggctacttcagaggctgaggcaggagaatcgctggaacccgggagacggaggttgcagtgagccgagatcgtggcagagtgagactgtctcaaaaaaagaaacaacaacagcggaaacacaaaatgctaaagccccaatgatcgaggcgtctgacttaccctaataaaaagcaagaaggtccatgtgacagcagcaacagagagtgaaggggaggagagtaactggagaggtcactggaggcctatcctggagaggggtgggttccgcactagagtgtgcatgagaatcaccagagggtgtgtcaaacccagatttcagggtctcacccccaaagtctctgattcagtaggtttgggggtggggctgagaatcttcacgtccaataatcttccaggtgatgccctacgatggagattatatcttgagaatcactgccttgggcattgttggccactgtaagaactttgactgcttctctcagtgaaatgggaagagagcattttaagcagagataggacgtgctctaacttatattttaaaagaaatcttctggttattgtgttgagaatagactgggctaagggaagaaacaggaaagagtttattggagcaagggatactaatggcttgatccaagtagcagcgaaaggcaggaatgataattggtcacttttggacacgttaaaggtaaagccaacagaattcacagacatgttgaatgtggcatgtgagagaaagagaggaggcatagatgggtgttttcattctctccgccactactgaatccagaatagaagttgtaccctggttatgcttaattcaaacattgcaggaaaaacagttcttcactattcatacagtcttcttgtccatcatgtcttcttgctctcctcaccccgggaaggccatagtagcgcaccccgaggccaaagttccttgttttacatttttaatttgtgtttgtttgtttttttagagacagggtctcactatgttgctgaggctggtctcgaacttctgaactcaagcgaccctccagcctcggcctcccaaagtgctgggattacaggcgtgagcaaccgtgcccagcccaaattttccaattaagcaaaagcaaaattttcaggcacaaagaaaaatctcctaaatatcaaaaagagtaaaagcacaaaaatattgacaaacaagataaactgagtaaaaagattattttatgtgatttagatagtatgatttcactatgtttctccccataaaaggtgtttttttattgtttttgtcttgttgcttttcaataagaaacttcccagttaaggaatgatcatgtaattgctgtcatttatgattgccaagctcaagaagacagtaagaaagaaagaaagaggccaggcgcggtggctcacgcctgtaatcccagcactttgggaggccgaggtggccagatcacgaggtcaggagatcgagaccatcctggctaacctgtctctactaaaaattcaaaaaattagccgggcgtggtggctggtgcctgtagtcccagctactcgggaggctgaggcaggagaatgatgtgaagctgggaggcggagcttgcagtgagccacgatcgcagcactgcactccagcctgcgcgaaagagagagactctgtctcaaaaaaaaaaaaaaaaaaaaaaaagaaggaagaaagggaggaaagaggtgggggagagggagaaaaaggaaaatagttgcaagctaatggaaagacccctgaactaggaatcagatccctgaattctattttcatcccttaggtgtacgatcatattctttacctcatgtctctcaggtccatttagatatcaaattctgtaattctacaaaccatcatattcatgaaaattgattctttatgagctcttttcttcatgctcagtaaatatttccatccttaattcaaagcacagaatcatggcttttaatggccaagtgggcctctgagaacatctagggcaacactctcgtttcacagatgaggaaactttcttttaaaactcctctgaaattgtctagaggactcatgaaaggtgatactaagttcactattaaaaaactaaaggaaaagatcagtttatcagggcatagacagtggatctttttatagtaactttaaaggtacctttctttaaatgttatagatgtctgtgagtaatttagactatgtgtttaacaatttgtctattttgatttcctaaaccaaggatgaagaatgcatcagtcagatgtgtttgcctttgttttgttgaaaactcagtccccgggtttatagaactaaagcattagagtgattgttttcaatgttgacaccatgccaataggacatttgaggacttataatattaggtactaatttttcaacagagaaagggtttattttgtcgttaaggagaggtattgctatttgaacagtgttgaattttcatgttacgattttgtagttgtatttcaaaatttcagttttctaatgtaacaaagttgtgctttcctgctataccagagagagccttaaaactgtccacctacactagaatttcctggattcacgccacactctcctaatgccttgctcaagtgtgcctgttctctcctacctcttgtcactctggagccatcagagacagtcttaggaaatgatttcatctccagggatcaccatgcctgaggaatgacatgcagaaacccagggtactgtattctccgtagacagaaaatgctagcagaaccacttgaatcatttctcaattctccatcctgagaattccccactggcttctaacaatctttgctgctggcagaaggaaagtagatatggggtttgagaggaaaggggcagagggaaggggagactggctgtagaatgtggagcgaaagtggaatgtttttgctgagtgcttagtgaacagttgcaaactgccacccttgggagaacctctcattcagccacttatggtgtatccaaaaacgcagattcctgcacctagcccaacccttcaccaaatcagaaagctgcatgctaactagatgcaatgcatctttggagcaccatttcttttgcctttgtttcttattttaaacaatctcaaacttacagcaaatttgcaagtacagtaaaaataacctttttttcctgaaccatttgggaataagttgccaatctactgtttctatccccaaacatttaactgagcattttctacaaattgggcattcatcctgcatgagcacaataaaaagatcaaaattagaacatgaatatggatatatcactactatctaattttcagatctcatttaagtttcaccagttttccaatgatgctccttgtaacaaaaaaaaaaaacgctttcaaactcaaatttctcattttgctgccacatctctttattctcctccagtctggaacagtttcccaatcttaatttgactttactgcccttgacacttttgaagattgcaggtcagttatctactcgaatgtttccaatttggattggtctgatgttttctcatggctggattcaagtgatgcatctttgaagaactatcacagaagtgatactgtgttcttctcatggcaggctatgaagggcccattatctcaatttgtcccattattgacaatattcactcgctttgattacttgattaaggtggtgtctcagaggctcctcaactacacagctgctttttcctctgtttgtaattgatgagtaccccttgtgggaaggcacaatgaaactaggtaaatggcccattcctcattaaactttcaatttattcatttgtgtacttatttatatcctcgtggactcatcatttcccattctattcaatgggttgtaataacgccttagccttggtacccaccaattcttcaaggaggtttggtttcttttagtagagaagcgtatttggaaactagatctgagtattaagtgtgtggatcacaatttgagatatgttatttaaaacagaacgatcagattatcttgatggttcaatgtggggaaccagctcacaagatcagtcaatcacatcttcctgatgaattcatccaattgccagaatggttttcttatagaccttccattatagctgtggccaagagatcaaattgtccaactttggttaagtttggcagagtacagcccaatgaggatggggagagcatggaaatctgtttggtgtttagggtttctaaaagtgttaactcaatcctgttgtcaaattttgcttgtccattatataacaccaaatcaactaattagcaaagggttaatattacatatgtaggcatgcccttgaattgtttatgcacctttttttgttctctttttattgtaagtgttaaaatacacatgagacaaaggtcacatttctacgctgatgacacggtgtgccgtgagtgtggacagtcattttgctaattcttctcattggtggttccgctagatggatgatttccctgaattagccatcataactgccatctgttcctgtgcatagatacagagatctaaagagtagaggtcaggaagaattttaaaaagggctgtgtgctcagttgcctctgtttgtctctctagaacattctctagactgctttttgcctgagacctaaggggctgcattgactggactccctcaccctcaagctttgggttggttaactaatatttctcaattttattttcatgactacactccctaaggaggcttttttagacattctttttctaattgtctccacctgaccatgaaattttaataccataaatatattgcatatctatttatgaactgtatcttttggagggtacagaccattataatagctaagagttttttgctgtgttttttgtttttttcctttttgccctgccaagaacaaatgtttgcttcccattgagaaggcatgcgctagaccagtggaagtcatttaagggagattggagaatggggggaaaagtactaaggacaaaaagacatttattctctttgacccttgctgccagacagaaatgacttcacccaaggacacagcacttgcgggtggccttctccacctccagctattgcttggtttcaggtgaccactccctttctcttctcaggcctatgggtggtaacagctcccatccactgctagtcttagacatctttactttccttgattgattcccttgactctgcccacatcttttaaaatatcccatattaaactttttacacccctttgaatgtgtcctgcttcctgctgggaccatgactagtctcttctagttggaatccatatcaccttctgtgatgtagtctccaagtcaggcagtctcatttcaactacagtctttctttatgcttctctttttcctttctggactcttacctttcttttatttcttactcagcaacagtgtctgcccattaaaatgcacctttgcggtggtggtttggttttctttatctctcttatttcttcccttcctgttgcattttcactggcattgcatgggatttttgtttggatactaagccaagcatcttatacccttgcatgcttgacatttctcttgcttagctttccaaacacccaagtcaccctgacaggctcttgaatactttcttcccacaagttagtgatcttagctggcaagagcagacaatggcttgttccaggtactagggatgtataaaacttgttggcttaaaataatgacatttattttgctcacacatctgcaagcttggcagggctcgacagggatagttgtctctgctctactcagcattggctggggtggctcagaaattgggaggctgaaatatccagggcttctcttactcacttgtctgagccctaagcttagaagactcaaacaactgaaagctggaagaactggagctctttgggcatctctctagcttgatgaagtctctccatgtaatctaccagcatggggggcttagggcagtcttacttgttacacattgacccagagctcccatagtgattatgtcaagagaaagagcttgttattcagtgttatttttaccacattctattggttgaggttaacaagtccccaggattaaggggagagaacttagaccctgccttttgaaggagaatgtcaatgtcacattgtatatttttaaaaagtggaatgagatatgtataggtacagtcatttttggaaaaacaatctgatctgcttcagtatcatacacataagtacataatacaatttttttttttttttttttttttttttgagacggagtctctctctgtcgcccaggctggagtgcagtggcgggatctcggctcactgcaagctccgcctcccgggttcacaccattctcctgcctcagcctcccaagtagctgggactacaggcgcccgccactgcgcccggctaattttttgtatttttagtagagacggggtttcaccgttttagccgggatggtctcgatctcctgacctcgtgatccgcccgcctcagcctcccaaagtgctgggattataggcgtgagccaccgcgcccggccgtaatacaatttttgagaccttgtggaagtcctttggggttcagaagaaaatactggaaattactaatggaaaacaagcagagataggaagatgtcagtaaggaggtcttaatacctactttgtataataatggggctcaggatttctgagtgagaagatcaagagtaggtacagtcaaggaaataagaactctggattcctgtctatgcagattgagtcaagcaagtctctgatctctatcaaatgaagaattaatcttatgattttgatgttctttctcaaaacccctggttctgttacgccatcatcaactcacttttctgtttcctgtttaaagtcactttctctcaaaatttgctgactccaaattctgttgcttttgctgagaagacagtcacactgctgtctatgcagctccactaaatcaagtgtgagcttcaagtcctcagtggcaccaagcgttatttcaagagttattcttcctttgtgtatgaaaatttgcattttgaatgtgtgtcatcagagaagtaatgggaaattggggattgtgatgtggccaagtcagaggacatgtgtgtgtgtgtgtgtgtgtgtgtgtgtgtgtgtgtaactatcaccattctttttctctaaaagagagttttgatggtagatgaggacgtaggaccactagattcaaaagtggaggatgtaaaagaatttggaaatagattaaacacaattctggagttgtctatgaagctctctttataaagtatcttcatatgcaacagcacatgtagtaggcactttctgacgatggtcacaacagaacgcagaatggctgaagccctgaaatgatgcacactgtatatgaaattgaacacgtcggtccacgaatgtttttaaatctgtaatttaaaaaactcccaaggtgtcgccaatgtgaaaataagtgagaaccacaagcaacctaccacatggtttgtagaggccaagattctctcagattcaaggatagaaaagccactcaaaactgttttaagcaaacttgtatctgaaaagtctatttgatacttaattagctaatttaccagttgcatcagaactaggttcctctacccatctctgtgctctgcctccctctgtattggctctatttcatattctcacctctctgggacaaagatgaccactaactgctctctcatcaaccctggtataagtggcatacttctttctcaatagctcccatgaaagatctgaaattgtttcattgtctccgattggctagactctgatctagcatctgcccttgaaccaatcactgtggccatggacatgtactgccctgactaggtctaggacacatggcaactctgggaccgggaggtgcaggggtggagcaacatggttaactataattaaaactatggaccaagtaggagctgagtggttccccagaggaaaacaggggaagtatcaacagggaaaatagacggtatgccttctattctagttcgtcgtcagtaaatattatttgatcattgaattcttgtgtcttgttctttaaagacagacaataagagttaggaggacataatgtcatggctaacaatgttgctgtaaattcgttatcaatttttccctttccactctcactttattataaaagatcaaaggggattttcaggaaagcgttaacactacttaaaagccccacctcgaagactggaggtgtggagagaagctatatataaggtggacccagccaggataaatgtgaaggataggcaagaagcactggtaggtgaaggtgaatagtgcaagggtatggactgaaaatcagtgtggtgggagaagtgagaaaacaccaggggaggaaataaaagctaaacaaaagagagagtgccacctctgtatgttgttgctgggattatccataggaaacagacatgtggaaaaggatcctgtgactaagaatagggcgtacaggaagtaaatagtactgttagcctctggaaagcaatgtggaattcaacttttaaaatttgcatgttgggcgtgttggcatgtgcgtgtaatcctggctactcaggaggctgaggcaggagaatcgcttgaaccccggaggcagaggttgcagtgagccgagatcgtgccattgcactccagcccgggcaacaagaacaaaactccgactcaaaaaacaaaaaacaaaacaacaacaaaaataattgcatgtttgctttttaaaacattgttctgtgtttccaagctgttttgacagtgggtcaaaggaatgccaatagtacggattatgactggcttcattttaaatggcagccccaagcaaagttgaaatttgaacttctgtttacatttagaaattctctggattgtctggtaaccttgtctttagaagcctgatgtttatatattggcagccacagggaattatttccctttgggtgttcaattgctgtccaatttccttatctactgcccattaaattaggaaacgttgggtctcatcatctgcttcactttccaatcactttaccagcaataggcttcaataactagtgccttgcagtgttgttttgtaagccatggtgtcctcaggatgcattttaaaaaatagatacctgaagtaatgtgaagagccagtttataggtttaaaacctgattttgagattcagacatagttcttaggaggctgaaccctgaggtttttcttttcaacttactcactatacagtgtgttgtatttccaaatatgaatcttggtaaggacaggtttgaaacagtctagcttcattgaccacaaaagttggttatcggtgaaacatgatgaaaacatcacatttctcatttaccaaaaggtgccttcagtggaggttattggattgcaaagaggatgtttgttggaaccgagaataaaaaccaaataaggttataaaacaaaaggtagtgatgatttgacattgaatggtatgcccagaaacttaattaaattttaattaaaatgtaattctgcataaaatttaattatatgacaatgagtattctcatagagtaagttaggaaagttttctaaagtcagttggaaaggcaccatgcagtgtgtcataataaaaaggacagaggctacaaggccagccagatctgggtttgaatcccagctctaccactgactggttctaagcttcagttttctcatctgtaaaatgggaataaattcttactctgcttacttggcaaaaattagaagtcaaatgtattattaaaaaaaccattcataatgtttgacatttaaaaatatattaggcattcaaaaatggtagctattatcactattattattattatttcttctggagaatagatatccattgtccctcttctcttcatagaaaaaaaaaatccagaaaacaaatgcctttttaaataacctggttgtagaattcaaactggctctgtccaacaaaattatgtttaaggctggagagagttttgctagtttcccagaaaaagtattgtcaaattacttttttcttgttgtgtgtattttttccctaaattctttttttataacttttactttcatctgtgtggaaatattcttggccatctctctgttgctatcccttcagtaagtctgcaattattttttcaagaggtgccagcccaaagaatcataagcccttatgagctaacagtgaagtctcagccaagaaaagaaatttaaaaaaccagtttcctgaaaattgtaacatacataagtttggaatgtgcttgtttgtttgtgtctttcttttttagtttatagaatgctttgctctttatgttgaaaaactgtccattattactggctgttggccattttttcatctctagggtaatatatttctactataaaatttcaactctggtcaaagcagacagtgtgttataaaaaaatatactgagcacaaatgcagtcgtaaagtctcatatttatttacctctcaaagtgaaagtgcttatagtattttagggacacagcattttttaaatactaggcactcagtaaatatttgtgggtggccaagtgaatgaataaacgaataagcaaatgaacgatgggaatttaccatgactgcaaatcatttctcctaagtgaaatatactgtttgttttcctgtgtgtgcatggagggggcagtgaaattgagataaatctcattgtttaaagagttctttagggactaccagagtagtggacatggtaataaaacattgttctccaaagcagaatatggtagttacagttacaggaagactattaacccctttctttttctagaatggctgccctgtatgtaatttaggttttgaaatcttccttttcctggacagagaatcggtcccagaatatcagacctgtgtttattggaaaacagctctatctatcgcagagcaatttctgttgtccttattaacaaagatctttgggaggtgaaggtcatttcaggccagtgctgaacagcaatgaatttgttaagttgttttccgaatgctgaaaggagatggacgtcagaacctggacatgaacctaaggcagttgggccaggtttaaacctcgcatgatcagtgggaatttgtgtactttatttaatgggaagcctcaattgccttatataaaaagtgaggcaagtgtagcatacacctttcagtatttggggtgaggattacatgagataacacgtggaaagcatttaccataatgcgtaaggactaccactactatgatctgtttctactcataatacttctaacatcaaatatgtgttttttccctcacactaagcaattctctagttctccagacaccaattagttgttctacaatttaagtcaagccttacactatctagagtgagcatcaggtggcacagattaaggactcagtcccacaagactccccccacttcaagatacccatggcaagtccaggcaacctgtacttctgacagacaagctacaaagtcataaagttgaggggttcccatgactctttcttgggtttgataatttgctggaatgggtcacagagctcagggaaaacaatttacttactgctaccagttaattacaaaggatgttggaaaggttgtaaatgaacagccagatgaagcagtgcatagggtgagatctggaagggtcccaagcgcgggagcttctgtccctatggagttggggtgtgccaccgtcctagcatgtcagtgcattcatcaacatggcagttctcctactcctgttgtttaggttttctatggaggttccgtgacattggcatgattgatgaaatcattggccagtgatgactgactcaatccccagcacttctctcctctccataggtcaggaaatggggccaaaagctctagctctgtagtcgcaaggttgggtgccctggcaattagccccaccctgaagctatcgaggggcccaccaagaaccaccttattattaggcttaaactcaggtacgattacaagtgacttatgaaacaaaagatgctcttatcactcaggaaattacaagagttttagaagctctgtgccaggtactaggatgaagactaaatatatatttcttatttatatcacagtatcacactaaagcataggaagttctcaataaatggaaaataaatagtggtcaaacccacctttacatattttgatgccaagtgtcaagaaggattatttatgaaactcttctcacacaagtttccatttcttcctttgtacacatgagagggcctgatcaggtcagaagaaatcacatttcacacccatggttttttgagccaaaggcacaggggtgtgggggtgtagggaggcaggttgggatgcttcctgctggcagtggtgtctcaaagagcacaaggcagggaaaataggggatgggtggaagaggatagctagggtagaagcaaaggaaaataagtacagaggggaggcagagagaaagggagaagggagagtgccatggtgaagagtttgacttgccagagctaattctttgtaggcaatattagggtttcttggaaggaaatcccccgttatggacttggaaggtaaaaatcagtttccataaaagagggagtattagatacactaagctggatcatgaagaggtaaaatgtatgaagattaaaaagaggatgcagaaaagaaaaggacaaaaatatattaaaaattagttcaactcctgctgggttcttcacgctcacagctgattagaaggtgggatatatctgtgtaacatatttgtggagcctgcttagctggaagtcctcatataccccctaccccaccacccaccttcccacacacaccctacttttggggagcctggctctgggctttttctcactgattcttggccagagacagcactcccttgccatgggggctctctatagaggatgcgtgtcctcatgagatggcagctggcttccctgagagcaaggcacgggggagagggagagcatgtcctggcttgaagtggcagtcattttatagcctaatctcaaaaaggacatagcatcactttggctgtgttctgttcattagaactgagtccctaaaccctgcatacacgcaagaggaggagacttaaaacccatctcttgaagggaggaatctctatgaatttgtgggcatatttttaaaaccaccatcatcccaaacagcattctctttagtttcttgttccaagacttcctgcatcccgactatgtctctgtctctgcttttggattatttgagatctctttaaatattaaattccatttactgacttaagttcgaaagtcctttccaataccatctgaagtcttggaatcagtgaaaacatgtcagacacgggcactttgctgtcttgcagaaagtaatgactttggtggacaagaggcagttggaggttatcttaacagaggatcaagccaattcctacactacaagggtaatcactccgcaatgagttcaggtatgcggtttcctaggctgagtcatctcctgctatttcgtcaggtctccccaaaacaggggtcagtacacttctgtaaaggaccagatgggaaatatttttggctttgtgggccacatgtggcctctgccacatattttcttcatttttattacaaccctttgaacatataaaaaccattcttagctggcaggctgtaccgagacaagcctccaggatgtagtttgcagacccctgcgctaaaataatcatagagaggtgcttgtcgtgtccttggaaatattttagatatgcttttccataccacccagccatggtaagagtcttctttctgtgtctctcaaatttcctaaaagatccaatttatcttacttcagacaaagagctgggagtccttttatcaggttggatacattttacataggatttctctcattccttcagggagacagaaacaggttcaaaaattaagtcactaaaatgactaatgtggtactgtcagagaagaattatgaacctgcagggttatggtctcagaaaattcatattgcgtttctatgcctcacgtgaataacaataaccttctccaacaagcagagtgaaaaatgtgaggactgccagtaagtattccttactgctggctaaatgctggcaccacacaggctttctatggcaatgggaatttgtgtcagagttggcttttaatgtggaaaataatccagtttcatactttggcttttatgtctttgctgttttctagaacgtcagcatgcctcgtgaatgacattgaacactccacaaaccaaaccaaaacaaaagccttttctgtgtgtctttatcagcaagtgaaatcaaaattgttggatgagaattctcaaaaccaaaaaaatctacgttttatttttaccagggcattagtaagaaatgtattacttagcccatgagttgacaaaagaaaatgtattaacatgtatgtgtgattaatgaattcatactaaaagagggaaaaaaggaaaaaaaaaaaagctgaaggaagaaactaaaagctgttcatcatattaatgttttgtagccccagataagtagtgctgctttcttattttactcccatgcccaaacctgtagtactgcaaaattgctgactcgaggtcctacatgaaaactgtgcagagacttgaaaactcttgcaagagtggggagttctatgaataaataaattgtttaaagggtcaatgaatcaggtataaacctcgttttgtaatcataaaatctgtggtctcaagtctgtttaacgctcttaaggtttacctcataggactcactattagttgtaattaaaactgaccaaaaaatcataatttaattggcgttaataggacagactttgaagggtcatattttattttggatacataatgtttcttcctgaaattatttattcttgtaaattattctgatttaaaatttattagccagttgttgaagaaattatttacttgccatttatttgaatggttcaagtagtatatgcgtatatttaagtatttatcctaacattttcatgtgatcgggaaaacttttgctctaacttgacatgttttaattggcgttttatgtcacaagacagcatttgttacaataccattatttgggggttttcataagaaaacctattacagcctaaatgttaaaaactaagatcatttagacacttctagaagcaaaaatcttctgggttccataaaacagggaaattgggtttatcaagtccaagatcatctgacattagtaatgagatatgggagaactagaataatttattcttataagcaaactgctgagaagatagaaagacctgaaaacctttctcaagctgttgctgtaagattgttctcctgcagtctgccttacgggtagtgtgctctatcatccctccaccatcggactgtttctgtctactgctgcctgctacatccactgcctcctcatggggctccacctgtttagggaggaaggggctctgcatattaaatgactgatcctagaaccaatgaggggctctgcatgttaaataactgaccccagaaacaatgaggtgctctgcatattaaatgactgaccctggaaccaatgagagggatgaggcattagacagaccgattctcattttcaatgagtgcagtcacttgcagagatctctcttttcatagatcacaaggctgcctgatatattttttaccaaacatatttctgtggagaaaaggcagctggaattcctttacatttatccaaaaaaaagaacatttgataagggcaaacttctgcaaattgaccgatttggcagaaagaacaaagaacatgctagaatactccttagtgagggattcatgtgtcgttttatgtctgtaccattgtacatactggcaatgcataattgtctgtggcctactctgccaccaggagagaggaaacagatgttcctatctgtcttttgatgtggcttctgatacttacattgatttgtctaaaatagcatcagctaccctagaaaatttttttcctagtccttgagttggttggctaattgtttcaggtgactattaataatgtgggccaggcacggtggctcatgcctgtaatcccagccctttgggaggccgaggtgggcagatcatgaggtcaggagttccagatcagtctggccaacatagtgaaaccctgtttctactaaaaatacaagaaattagcgggtgtggtggtgtgtgcctgtaatcccagctactcgggaggccgaggcaggagaattgcatgaacctgggagacggaggttgcagtgagctgagatcgcgccactggactccagccaggatgacagtacgagactccatttgaaaaagaagaagggaaaaaaaaggaatgtgattatcatctcaagacgatccactgtcagcgggtattgccctgttacagggaaaagacagagaccattgggaagtggacttacagaaaaaaaaaatcacacagtattttatttattcaaagtggagtaagaccccagtaagactttttggaatagatctaatgaaaaattgagggtaaatttaaattcaacatcaggaggtcttagcactccctgctccatacagtaattatagaactgtggttataggtaggaagactagataattagagtgttatcagtagtcatgggagaagtgacaggttcattactaaataaaagtaatttaccctaaattgaaaatgacagctgatgccttctaaaagcacagcttgattagaaagaaaccatgaggatattggatatatgtaggagaagaaggaatggcaatagatctgaaatcacaaaatatatgcagaaaggagatgacgggggttagagttctccttttgcttaggctggtcccgagggcccacaataggctatattcttatttatgacataaggagaacagatattggaagcaactgtctcagaccatcagtcaaaatgtacaacgcagacaagatcacgaaaggaaaaaataagctaacagggggtatcaggaagtagcataactatattaaaattgactgttatatgcacattttacttaagaaaatcttatacaaaatttctagaagttattctagagggatttctactgggctaattttttttctcttcatctatttgacctcattttttattaaaagacctctgttgcatttctcatggtcactgtaagccagaatgtcccccttgttcccagactccacaacatgcagtttttccaggctgtcagctagggtggaatgcagggtggcatcaaagcgtggtgactgacagcttgcctttagccggcaaatgatgaaggctcaaatcgtaattctgctccctgctagctatgggtgctttggagaattgcagagactagaacaacatttctccacctaaaaaatagaatattcattatatctgtattattaagttgttaagaatgttcttcaggataattcagagcttttgcagtagaggtcgacaccattcctcattcttcgcacctccgtccaaccactcaccaaagccagttggttcaatctcttgaatctcttttcagtccatcctgttctctccctcctcacctgctgcccctttatctcaggcttctgctatctcttgtggagtatttcaatcaatttcaagtgggtctttcatgctattacatattcctaccccacaaaacagccaggtgagagagaacccacccatggctcccagctgcccccgtagacatgcctcactcccagcaaagggcacaaagccctttctaatgtgaccacggtcttcacctggcttcaatccttccccactccattcgttgtctgctccagccgtactaaattactgtgactccccaaatgtacatgcttcctctcacctctggggcttgctccccacccagtgaaacattccctctttcctcaactcatcctacttcatttgcgtgaatatttcccacttagatccatcgtgaagcaccggccatcggcactcccgccccataggcccctcgtaagtctttgaagatgccaaagcctttctcacataagagttcctggacgtgctcttcactccacctggagcgatcatccctctctctccttttaccccattcattcctactgattaattttgcttcacaagtgccttaggcttatcagctcaaatgccacttctacagggaagccctctccaatactcttgtttgttagaagccatcttagccacctacaacctacatttcccttcgttagcacgtatcatgactgaggatactatatttgcgtaattatttggtttaaaaatctctgagagcagatccctccaagcacatgctaagacaaagattcaagggccagcagttgatctggggagtgattcccaggaagggccagtagagaagcggtgaagtgagatagagaaggggaggaaacaaaaacaggtgcatgaacaagtagattgtcctgtgggcagctgagacttagtcctgcgggaggactccgggaaatagtgtggatgtgcctctgaggagtcccactccaggggcatggatgccagggtaggggtatttgttcgccccctcctgtccgtcattggttgagggctgcttctgggatattaactccccagcacctcagtattggcaggacaagcatcctgttgagaccagaaaaagccctcaggccgcatattcaagagaagaagcctctggtgcatgcagaaatcagaggtaagtgccagggacgatggccagggctttgacagctgtggctacaatatccatctgtcccactggactcagctccacagctcttttccccactagttatctctagagcagcactgttcaacagaaatatagcatgagttacaaatgcatatgttgttttacatttttcagaagccacatttataaaaaaggtgatattaattttaacactatattttacttaacccaatagatcaaagtagtatcatttcaacatacaaccaatatgaaaatcgttccttagatattttacattttttcacactacattcaaaatctgacatatatgtaacatttatagcacatctcaatgtggacttgcctcgtagtccgtggagtgcccatagccatgtgtggctagtggctatcacagtgggcaatacagctttaaaggacagagtctgggagagactgagacctcaaaaaatactcagtgacaaaagtctccgctggggcagtgcctcccctgagcaaatttcactgactgcctccaggactggaattaggtgcttaagagcacctgctgccctccctgcttcctccagcacaatgttagctgtacctaactgggtcttgtattcactcatctgtctccccagcatgcttctggagggggtgggcccccaacttgttcattcctgtgtctgcagcacctggtgcaatgtccagaacagagggagcttccccaaagttttgctcaatgatgaatccattttaagataaggtgattacattatcatctttagtgaaattttagtgaaaaggtaaattctatacattgattttatgaaaagtctatttttgtctacaaatattagtatagccatgagggattattcaactcatggctacagagattcagaatttggacaatgaacaatgcagtaataaagtgggcgttcatagccacatgtaattaacaaaaataaatcgcagcatactttctacttttacctgttaatactctagagcctagaccaattgtattagtctgttttcacgctgctgataaaaacatacccgaaactgggaacaaaaaaaggtttaatttgacttacagtttcacatggctggggaggcctcagactcatggcgggaagtgaaagactcttcttccatggcggtggcaagagaaaatgaggaagaagcaaaagcagaaacccctgataaacccatcagatctcatgagacttattcactatcatgagaatagcacaagaaagaccggcccccatgattcaattacctccctgggtccctcccacaacacatgggaattctgggagatacaattcaagttgagatttaggtggaggcacagccaaaccatatcaccaatcattctcaaagagtgtggccacactcatagcagcagcatcacccaggaattgattggaattgcagtgctcaggccctgtcccatctccgctgaaccagaacccagctatttgtgttttaacaagcccttcaagggcctctaatgcacagtgaagtttgaggaccagtactccagatagagtaatttccaagttactcctttagaaggaaagcaggagatcttagacaagagcttcctgtgcctaaaattccacacaaacaaaacatttggtttatctgcctaaaggtgtgtggtttctctacttgcaaattaatttcatatgaagtaaagagaatatgttgagatttattctggtacaatgtcaaatagcgattagcaaaacatttggctaaacaaagccattattggaaatctgtaatttttaaagagagattaaatacacatagaccaccctcttgtttttatacttgtcagtcagctttggggtggttgttgagttttatcatctatgggatcatactgagggcaagagcacatttttggaaaaagttcatacaaaatcatgggaaacccatatattgctttcatcctgaacttcaaaattccaaatcaacatctttaaagttttattcctactacttgaaatagcatgtctcaacacggaagaaacaagtattttaaaggaagaaagtggtagaaacacagaattggtttttgcttcccatgataatatggggctgcccacaacctcagatatatgtgtattgaattataccttggagagaaaataaattaggctattcagaaagcaggagactttccctttgtgagttgccccagacagacacttgcactcacacatctacatcttcaatcgttgacttcccaaagagccatttggacaatgccaagtggagaactgaagcagttactcctttcatccagcaaaaatacccaacatttattcatatctacatagaggaaacaacttttttttatttttctctggatgatcatctctagcctcagtttcactttgtgcaggcagacacatctcatgaaacctttccattcctctcccttctgtcaactcctaaagggaaaggcttttgtcttctgaatagcctaatttattctctctccagcatcttgaacgttgtaggtactcaacaaacattaattgatgacaaagctatataacagcttttgaatttattcatgggatgattcttctatttaaagaacatctttatatactttccattcttcagcaaaaaaaaagcaaagaaaaaaaatgtttcatcttgccagttctgtatttaacatctgcacagagcacagtgtgtgcctgttttaaacaaatgtgtaggctcactggttatctagattcaggaatgtaaaggacaatacagagaaatgtaatttttagaagaaaatttaaacttagggcttaatgaaaaaaatgcagttgctgttttatcagagagagtgagaaagggagagaacaaggaaatcccattgtaatgctattatgctaacctcattttggccatgattttcccagttatagagtggacaccaggttatgtgcatatctgagaactggcataatttatcatcaatttgcgagcacagaacaactagtagaataactgtgtcagtataagttgatttctaacctcagttgtaccatgaagtcattggaagactttgggaaagttacttaattctcatttgttagttacttttaaaaaacagccacatgaatatatttcttattattgtcattccttaatagttattgattgtgtacaggatgctttgtatctctgcaaggcactgcaacttccccagggaagcccacattaatgaatagtgtttataaagtacttggaaatccttggattaaaaactaacggtatcaaagtatttgtattaacatgccatatgggagaaccgtatgttatttattaagaggctatgtgtggtattgaaaatagctctctggtgcatcactttgtgctatttttatatcaagatatgccacggcaagttttggtacgcttgggtcataccttcaatgttgaaatgcctcaaaattcaatccttccacaggtatttgttgagctccttattgagcacttgactctctgcttaccattacacaacacatatggaaggcccagtggcacctacagtttcatgcatttcgtctctttgaacacgtgttattaaactgaagtccccgttaacagacacacgggcttaaaaaattacaggttccatttttcctcttccttctacatggacaatgctgttttgagacacaatgatagagatagggctgacacgattgtcttgtctgtcctaatggttgaagactaacccatgaagcttgcaccccttctgttaatggggcatggatgcagcactatttgagtttattttgggtagaactggcagccaggagagcactgcccagcatttccccaaactggctacacatgctgcaccaccttcccagaaggctgtaagtcattagtctggagaactatattgtaacgagttccatacaaaatctgcccccgcctggggaggcaattccttctcttagctagttgctctaataaggagacgatggcaatgggtgtattatcacaaggtcctgagatcttatgtcggggccagcatccttgaaaaattctgttctaaatgacatgtggaacctcatgcttcataagtaactgaaagatcctggaatagaagataatctacctctttttttcctgattcatttgtgaactatccagacaaggccaggtaaggcaagagcgtatttcattaactggagaatatttattgaacccctaccaggtacttaggaaacattgtttcacaaagcagacaaagacccttgcctccgtggagcttacattcaaggaggggcaggaacacataaacaatgaacatgatacctacctaaattagaggatatgatatattagaagatgatggacaattgaagaaccaaagagaaaaagttgatcaggataagaaggatggagtgtgtgagggtggggagatgatgcaattttaaatggaaggttcagtacagatctcattgaaaggggacatttaagcagtaacttgaaggagctggagagaaagcactccaggtggaggggtcaggcaatgcaaaggcctggggagaggagactccaatgtgctggaggaacagcacagaggccagcatggctgcagcgactgaaccagcaggataccaggagagaatgaatgaagacagagaaacaacgagggtctccaccacgcagggtcttgctgccatcagagcattcaagcaggggagtggtatgagctgcctcacactttaaaacaaaccagctagtaggctgagaagaggtgttgagaacaagaactgaagcagcaaaacacatcaggaagccattgccaccacccaggatagaggggatggaggatggccccagccggcactaaccattaactaactattaatacttgtgctccccacacttcaccatttgatttttgggaaccattagttgagatcaaagacacatgaaatgtttaaacaaatccacaatttaatgaagttcaagcagaagctgagatagatatcatacttcatctgcctagagaactgaaatacgattcaaggaaaaaataataatgctttgggggaaaatgaaatttccctcctaatcccttgacatgtgtttatggagcccttaacagataaggcactgtgctgggtgccaaggacaccacagaaaaaagagacatctctctgcagagggcttatggcttagctcttgcaggtgagcagaggtctcaggaatctgcaaggcaagaaagagagactccaggatttggcatgatctggacctgtgtttaagtctcagctctgccacgaactgtgtgacttcagggaagtgactttgatctcccacagccttgatttcttcatctgcaaaaatggagataaagtcgaatacgacggtatgacgttcatggttatgtgtgtgaggtgtgtgagcgtgtaaaggcctggtgcaaaggagacatctgtaggaagcggcagctatgactcctgctaggtggagactattcactgcacacctttttatctgcactaaaagatgcacatgaggctcttcattaaaacaatgaggcagccaacatggaaacttttctaagagtaagctattaaaatagatcaatcagctaatgacacctccagacaaaatttgtaaaggtttggaactaacattccctccctcctttccttccttctttcctttcttcctaaagccattaagcaggactgagaaaaataggtgtttgcattggagagaggatggtgctgaggggtcacagggtttggacagagtcggaagggcttctctgtcccagactactgtgaactaaagagacacaacaactgaatgctgtatgatcctagattgctattaggttattcttgaaaagtggcgaaacacagatgtgatctgtagcttagatagcaggaatgtcatctatgttaatcttttgatctggatggttgtattgtggttatgaaaaagaatgtccttgtttgtagaagatatatactaaagtattcaaggctgatgggcatgattaggacatgattatgtctgcaacttactctcaaatggttcaggaaaaaaaagttcttgtcctgttcttgcaacattctgttgcttaaaattattccagaataaaaatacctttagcaataaacacaaaactttagagttgtagcactgcactcacttgatatgagtgccagaggggtttgattctcaatatttgttgtgttcaatgttaattgagttaatccagatgagattatcatttcccacatttttgctgattcataatttacatatcttacccagacaataaatagttacatttctaagtaggcagtagtaggccccaacatcagctaaggctgggttgaaactgtcccctgctgccatcacttgctagctgtggaatcttaacacgcctgtgtctcagttgtctcatccatgaaatgcagataataaaacctgcctcatgcagtttttatgagaatgaagtttgataacctttgcaaagcatttagacactgagtggaacatatgcaatattcaataagtgttagctggtattagctaatattctgttgctcatagagctctatagttaaataaaccataaacatcattatattgatggcagtgcagactctttaagagcattcctctgttatatcagctaattttacttttcaaatatgtaccttctagagaattttggaacatatgagatgaaaatatagatggggaaatacaaaattaaagactagatttttttataaaagagtgctaattttttttaaagttaacttaaagccttcctgagctgacaaaaataaacatgtgtattaatcagctattgccataataatgctgtgcaataaatcaccccaaaatgcagtcccctacaacaaaaatatttattctcatgctcacaggtctgtaagatgactatggttcagctgatgtaggctgggctcagtggggtggttctactgcaagctgtgagttgcttgggcttggttccagactgtgacttgggttcaaacttgctccatgtatctctcatcctccttaagccaagagctacaggggcatcttcttgtcatggcaaatgtcaggaacacaagcaacaaatccttttatgcagtgcatgtaaatcctttgctcacattctctccactagcatttcattagctaaattaagtcccatggtcaagtccaacatcaatggcatggaaatattctctgctcacagtgggaggacactgattttatatatatatatatacacatatacacacaatcttattataggggactgaagaattaagaccaataatctaatctgcaaagcactggttttgaattgtccgtagtctgtctgtgcccagaaatctatagacctttagaagaaaagacagcagtataccagcaggaagtacacatcagattgtttccccagtatagcgatggatttatttagacttacgtcttgtttatcttcctgtcaccatgtagcgttcacaaaaggaactacaaatatcaggatagcaatccgtgatcatgttgttgagattttgcccttacaaaactctcccatgtagagtcaaacatggactgctttcttatcatagtcacgttgcagcaggagcctcttattttatttctataaaatttctgaaatgttcttgcaaacagtacacatttgataaatattggttgaaagagtaggaggcagagtactaatatgggagaaattagaaggacacaaccagtagaattctcacaggtttctgtgctttttcagcatgggaaagtaaagtgttatatcacactcgacatgaatgctatggaaatttatcatctgaaataaatatgtgatcttaaaggaatattaactgagaacatttagcttctatgtggcattatttaagctaacaaaatagcctcgcacttccctatatttcttcaccgttattgtaaggcttttaaaatcccttctggaaacctcaagtttacacatccctctacttaatttttcattgtttatgtgcttcctgtgacgatagctagacagacaaggctgataaaaaagaaagcttgtccttatcaaagacttacgggtaactgtgttaatgtgccttgctttttctaccagtggaagccccctatttcactaagaactcacccatttgcagcatttaaaatggatggaaagttataagccagccaaaatgtccttctaaaagaatgaaatgaatactaatctaattgcccaagaatgcatatgctgggcttggaaaataagccttctacattggttccccctgctggatttgaggatgcactgtcttggaaattgatgaaagcaatatacctggaccgttttatctgaggacatgttactggaatggcaaatccagcattcttctagaaagcatttgctctgtgataaatgtgccaagtgtttcttgagtttgcttccccagggcagaaatactgcaaatagaaaacagtgccgctgagactcaaagagaaaacaaaagcatgccactcagatgtctgttctagggaggggggtagcacacaaggaactaagggtaaaaacccagaagcagtagactaggtaaactgccagactggttgttactattagaaagctggatttcagggtctgaccatggatttccttcttatgcatttacaactattagaaccaattcctcacctttctgtaatttaactgctgtttttctttcccttcttatcttcctcacttcataagtaatctccctacccctactctgtagaagatgtggtaaccagagtactttcaaaggaagcttgtcacctgcaaacttcatggctattgtgaaatgtgttaaaaggtctgtcttttgagggagacagagaagctggcagatttttcctgcttgactcagagtccatttggtgggaggaaagggacagatattggctaagtttttggcacatgctcctgcaccaacttggccttgttaagacagcaagaacagcagaagtgactatttcctccctagagcaaaggccaatgctgtttccttcatggagaaccagaacagggaaaatatcagataatcatgtagtacttgtaaatatgccatttagaacactgaatttaagtggcatgcagagccaccccaggttctcatattatattcaggccaggtgtggtgtcttatgcctgtaatcccagcagtttgggaggctaaggtgggaggattgctttaggccaggagttcaaaaccagcctaggcaacaaagcaagaccctttctctccaaaaaaataaaaaatcagtcaggcttggtggcatgtgccttgtagaccctgctactcaggaggctgaggtgggaggatcgcttgagtccaggagttaaaggctgcagtgagctatgaacatgccactgcactccaggctggacaacacagcaaggctctgtgtctattaaaaaaaaaaaaagtagttatattgtgtccaccgtcacaaacggcacagggctaacccaacacagggggtcctgtacgtatatttattaactgcattcttcgccaacctcagagtatcattcttttttctttttttgtccttctattataaactttttttccccatttaggtcaaatctaaatgtttccccatctgaaactttcttcagtaggtcgttttccagagctgcaggtaaaatgcttccccactgcttctgaggcttttgtttcagctctgctactagtggcctcctcttgggaggattctcttgcctcggaattaagagttggtaggaggaggagatggcgggtcaaagcactcaagcaagacaacgttaagtgattcagtcctgcttgtgggtcaggaatttttaaagggctcagctggatgtctcttctgctccttgtgacactggctgaggtcaccgctcagctgcatttggttggcagctggcagggtggaaaggttcaagaaggcttggctcacaggtctggcccttcatgctccccacacatcttttctccctctctccatgtgtctccctccatttggcaggccagcttcaacttctttacagcatggggattggcttcccagggggagaaagtagaggctgccaggtcttgcagggtagcttgtaggtcccagaatatcacttccaccatatttcattggtctaaagaagtttcacagccagtcaggacttaaagagaaggaatgggctccactccttcagagacaaagcatttgtggccatctttaacccacatgaatataggttggtaacttctgcttctgttttctgtacttcactatatgttttatactttattcttatgtctttgtataaattcatcatttttatttgcttcattttccaaaccaaaagcaatttggagaccctcccagcaatgagttataaaaccatgcctatacttaaccttcaaaaagcttattatttctacagataaatccacagatatagtagctattttaagaaaaaagaaagtttcagatagttgctaatatacagccttcattgcacctgaccagttatttttcagatagctatatatgatagcataaactcaaccaacataatctgttcaagacaaaatattttatagcataggtatgttagactgccatatggaagttaagtgaaaattgaccttttttttgcagcatatatcatacagagaaataaagggcgagaaacttagccaaccttccttacacagtgcatgttacttaagtcaagggagaaaagtggactggagttgaagtttctattatattttgggaaatgccgagcaaggagagacttgttaccgggactgctgagtgaattttgtttactgcggttaaacatttcatctagcaaatcatgtgagaagggatgagtataaatgcacttatttatgtaggtaatttttctgtttcatgcctctgattcatctctctgcctggctttatggggagtcatgctacattggttacaattaatttcagtgctgcatattagccgtaaagagatatttcacaaattgacttgatgcattttttttcctctgtggttttcttgaaagatgagaacggtccagaggagaagcaaagtgtggaagaaatggaagagcagagccaagatgcaggtaggctcagatttcttttgagaagtcacctaggcctcatctgcagaggtgaacagtaacttcactcaatgctattgtctgaaaatgcttatacatttcaccagatgaactccagtgttcattcagggtctccctcaggaagccaccatctccgataactatgagttgagtgctttcaaacagagtggcacattctcacatctcattcaccaattcaattttctgccctgtaacagtttgcctggcaaagctctaagagggacgggcggaggttgaaagtgccaaggcagagcttggctgagttaggtcaagctcaaattagtacatttagcttgagggaaaaaatgaaataaaaactgatgaaaggaaatgaagaagaggcttggcctgcacagtgagtagaatgttctttagtgtattgcattaaattttgaagagctatgcttcaggttatttctctgcatattgcaggagatggtgtgatgggcctgactaccccacacacagagctcgaagtaagatctaaacccttcctgacatcccctctgttcactaaaggacagatgtgtccattgaaagtttatatattccacaccgtagattataaattgaacattttaaaataaaatagcacttaaggctcaaaagggattgaagtcacctgtgatttattatctcttcctatccatttttgtactcagtcatgctctcctttaaaagaatgataggcacaatcattcactcaccaacataaccagcaaaaaaataaaaataaaaatccctgttccctttagtttcccagttattctcccaactctaataagccccatggaggggcacttctgaagtagtgagccctactgtttgccaagcacatcctaggccatatgctgaactcttggaattaaaccaggtagtgtgataagtttttcactgtaaacttcttacattaaccttggagattttgctagggatctggaagcttttattattaacctggaagacggaactgaagaaggccaatcagagaaagcactgaagcaaggcagcaaggactttgtgtacctgtgactgggtcggccggcgtcctttgctgcaagatagtccttgcaatgaaatgaatttctgatgcagaaaactgttgttatccaaccctcccccacccccaacccacacattctgctccatagcagatgagtgaaaagctgtcactgtttttattgtttggggctgacaagtattagtcaacaaactgctgacagctgaggccattctgtgactgttgaggtttcaaaggttttattcactcactatcgtgtcccaaactgttttttttgtttgttttttgttttttgttttgttttgttttgtttttttgagatggagtcttgctctgtcacccaggctggagtgcagtggtgcaatctcggttcactgcaacctctgcctcctgtgttcaagagattttcgtgcctcagcctcccaagtagctgggactacaggcacgcaccaccatgcctggataatttttttatttttagtagagacagggtttcaccatgttggtctcgaattcctgatctcaagtgatctgcccgcctaagcctcccaaagtgctgtgattacaggcacgagccaccacacccaggcccaaagtgtccttatcgaaaaagattgtttccatccctgtacatacatgtacacacgcacactcacacacacgtatgcatgcactcacatacacatgtatgcatgcactcacatttgcctgtgtttgatttattcatcttttccctttaaccagttgagaacaagtagtttgtagatttgagatccttttgcctgtgaggagggagtggtagaatgtcagccctcttctccagcccttgaatctgatagcgttatcaccacaataggggcacttctcaatgtgaagaagggtcctaaatgcatccctgagtgactccccttacttttccaagtgagctcgccggccggcacagaggccaatggcagagtccacctataatcctggccagtgtcaacacacatagttacgttcacactgctcatttcttatcctccctaatcagagctcagagaaatcgaagatgtggttatgggtcgttaaagctcttttgacctgctggtatttttccaaaataaaagtatcttcttttcattcaatataatttccagcttcaattttgattatatagctctgcaggcctcttacacgtcatgaaaaaacacaatcttaaaacactgtaatccagcagttttgactgttgtcatgatcaaatcagatcaaagttgtagataatattcttccaaaaaatttaacaaatacatatcaagggttcattgtgtcataggcaccattccaggcactgaagaataaaccaacaaccaataaaaacaacatctctgtttctttgaaatttatattctggtgggggttccaaacaataaacaaataaaaatgataacatcaatagtgataaatgctttgctgagaaataaggaaacatagaaggaatgcccagaaggcaaatttccattgtctgggtttgggacggactctctgaggaagtgatagttaaaatgagatctaaatgatgagatagtgacagagaattctgttccaaaggacacctgacctgcaagtaatagtacatgcatcatggacaaaagataggctagaaaataagtgatttgtgatttgcttccaaatatgtgttagttttcatgcatatatgagttatctttagttccccgaccctgctactacataaaaaactatgaatatgtatgtgtgcatatgtactatatatatagtttatatgtataaatataccatatatgtataaatatactatatataaactatagagtccatgtagtatatatatgcatatgtaatgtgtgtgtatatatatacacacatatgtaatgtgtgtgtgtatatatatagtttttcatgtagtatcggaatatgtatatataactatgtacgtaactatatatcgctattatatataagtatatagctatacatattttctgctactatatgaaaaactatatatatactatatatgtatatgtatactatatatactctataatttatatatagtatatttatacatatgaactatatatatactctatatatacacatgtgcacactataaatacttttttctatagtaacagggtcatagaactaaagataactcatatatgcatgaaaactgacacacatttggaatcaaatcacaaatcacatattttctagcccatcttttgtccataatgtgtatatgtgtgtatatatatatatatattcattttccagttatcaggtattaaacattgcaaatgattttagtaatcctgcctgtctagatttactgtttgaatgggagggagtaggctagttagctgttatcgtggaggccaaacatgactagagtcactaggggctgatgacactgaggagagaaaggtctactctaatgtagttcattgttgctgtgaggggaacagagagttccatgtccttagtccccattttcccattctgttcttgggtgacatgaaagttcctggtggcttctggtgacctgtgccgaatgctccccttcttccaggcctctgtgctgacagccatcagagctgctccctgcagtttgacagcctggcataatggagcagaagtgctgtgctaagaaaaaaacaaactttagaaacatgcacataaaagcactttgtaggaacttgcaaggatatactttctttcacaatctgttatcaagaaaaataatataccatcctttgagggatgaggaagaaacaaaatgccaaaggatactactagcaacaagtggcattcttcactaagaaatagattgtagcccattggtctctgacttaactgaaggttcctgtttcactaattataaaagagagtcccaaaccactagccccttcaaagagcattcagtgtattcaagcatgcggcaggctcatgctttctttggtggagagtggagggaggtgcagggcaggaaagccacagctggacttccggaaggatgaactctgaggcagtgtttcttttctgctttatagatggtgtcaacactgtcactgtgcccggccctgcttcagaagaggcagttgaagactgtaaagatgaaggtatgaggctactaactatatctaataattgcagactcttaaaagagactgtttgggcttgtttacatggaaaaatgaagcagcaagtcaaatataactaggttttcttaagtgtctctgtttccaatataattgactacaccacctactctcttttattgcatacctagcctgtatagaaaatttatatatatatatatatatgtgtgtatatatgtatatataacatttacatttgttcctttggaaaataactgtttatgaaatgagagaatgatcagagaaattatgtttagagatgtttatttaaaacaccagaattaatcagttctgctctttacagccactcatcaggaaaaggtttgaaagagtggcatttgaggaccaccaaccagggagcaccatttttcaaaaaagaaatgtttgaaaggcatccttagaaatgaatctttggcaagagcatcattctccattctgtcagaagttactatgagaaaatgtttctgacccaagtatttccagaaaaagtaaaaaaaaaaaaacaatttacttttctaggagacagtttgaggaaggaagaagtagggagacattgatctggggatgctacaattaaaaaaatatatatctaaaggaaaacaaaatagtgctttttcttctctctctcctggttcattggcaagtccccagatggaaaagtaatataggcttaccttgttttcttgcccttcattttactgtgctttgaaaatattacattttttacaaattgaagttttgtgggaaccctgcatcaagcaagtctgtcggcaccatctttccaacagcatgtgctcatttcatgtccctgtgtcacactttgataattctcacaatatttcaaacctttttactattattctgtctgtaatggtgatcagtgatcagtgatctttggtgttactattataattgttttggggtgctatgtactgtgcccatataagatagtggacttatttagtaaatgtggttctgactactccactgacccactattcccctgtctgtccccttttctcgggcctccctatccctaaaacacaacaatattgaaattaggccaattaatagacctacaatggcctctatgtgttcatgtgataggaagagttgcatactaaatcacactttaaatcaaaagctagctatgtttaagcttaatgaggaaggtaggtatgttgaaatctgagataggctgaaatctaggcctcttgtgcctagttgtgaatgcaaaggaaatgttcttgaaggaaattaaaagtgctactccagtggacacatgaatgataagaaactgaaacagccttattgctgataaggagaaagttttaatggtctggacagaagatcaaaccagccataacattcccttaagccagagcctagtccagagcaaggtactagccctcttcaattctactaatgctgagagaagtgagaaagctgcaaaaggaaagttggacgttagcagaggctgattcatgaggtttaaggaaacaagctgtttccattacattaatgtgcaaggtgaagcagcaagtactgatgtaaaagctgcagcaagttatcaagaagatctagctaaaatcactgatcaaggtggctacactaagcaacagattttcaatgtagacaaaacagccttctattggatgatgaggccatttagcattttcatagctagagaggagaagtcaatgcctggcttcaaaggacaggctggctctcttgttaggggctaatgcagctggcaactttaagttgaagacaatgctcatttactattccaagaatcctagtgctcttaacaattaggcgaagtctaccccacctgtgctctgtaaatggcacaacaaagtctgtattatagcatgtctctttatagcattgtttactgaatattttaagcccactgttgagacctactgctcaaaaaaaatgattcaaaatattactgcatattgacaatgcacctggtcttccgagagttccgacaaagatgtacaaggaacataatgttgttttcatgcctgctaacacatctagtgtgcagccaatgtatcagggagtaattttgattttcaagtctttctatttaagaaatatattttctaagactgtaactgccatagatagtgatgtcatcctgtaatgaagctgggcaaaataaactgaaaatatggaaagggtttactattctagatgacattaagaatattcctgagagaaggccaaaatatcaacgttaacaagggtttgaaagaaggtgattccaaccctcatggatgactgtgagtggttcaagacttcactggaggaagtaactaaagatgtggtagaaatgtcaagagaactagaagtggagactgaagatgtaactgaactgtaatctcatgaggaacttgaacaaatgagaagttgcatcttatttattaagaaaaaaaagtggtttcttgagatggaatctgctcctggtgaagacagcaggtttgagagtattgagttcaattttttgtttgtttttgagatggagtttcactcttgttgcccaggctggagtgcaatggtgcgatcttggctcactgcaacctccgcctcccaggtgtaagcaattctgtctcagcctcccaggtagctcagattacatgcatgcaccaccacacctggctcttctttttttttttttttaagtagagacggggtttcaccatgttattcaggctggttgcgaaatcctgacctcaggtgatccacccgccttggcctcccaaagtgctgggattacaggcaagcaccactgcgcctggcctgagttcaattttaagataatttctactgtgggtaaaatgccatcaaacagcattgcatgccacagagaaatcttctgtgaaaggaagagacaattattgtggcaaacttcatcactgtcttattttaataaattaccacagctacctcaaccttgagcaaccaagtggtggccgtcaacattgaatggccagtagtggctatcaacattgaggcaagaccctaaccaggagaaagattacaagttgctgaaggctcagatgatgattagcatattttagtgaaaaagtatttttcagttagagtacattaactgttttttaagacatagtgtatctaaaaatataactgatgtcaaatacccacataggctctgataggaaaccctaggtcatcttagagagacaaataaatgtgatcaaatgtgatcagagcgaaaagacagaaagtggtgttcaccttaagcaaaaattttggacataccaatcatttagtttgtgataaaaattttaaagtgtcatgaagttgagtggcagagtttaagaaacatgaaagagggataatttaatttgaatgtgaccatgtttcaggctgggatttttcctgttgagttgtttaatttggagatatcacaccttcacagaagcacactgtttgtgatgtttcttgatgcttttaggaactcacaccattaattgcttatgccaggatccatgttttggaatacttttaggattttttttaacataaaacttttaatgatggtaactccatgaaggagttctgtcatgtatcacaaatgcagttcctatgtaagactaaatgtgaagttttatgagtattactgaaataagccattaatatctattaacctatttacttagggaaaatagaaatgttttgaaatccacactagtatgcaagcttctttcaattaaaaacagaatgcctagggtatgatttttgcctttttcttctgaaatagcatgtatagaaaaccactgtttttaattgattatcagttcagagcttagaccagcttagaacaagtgtctaatgcttatggaactatcatcttgactgatagatacctagcttagaaaaaaaaaatccgttgaaatccttcaagattgaggtcaagataaggttaaaaggcagtcatatgcgtggaggattcatttcaaacattctccattattagctttcatgcagaaatatctcttctcagtgacatctgggctattttagagctctgcagttataagattgcttatagaaatgctcattacactctccaatttaagtggcagaacatttttgctgatcaaatgtcctgaagaagcccttgctctcttgagttcgttttcagactttgatcctgaccaagcatcttcttgggctttagaatcactgatattatggacaggtctttttttctctttctaataaaactcccaaggattttgaggctcattcagttatttccagctttgcttgttagtgggctggctttacatttgttacaaccttggtttccacaggaaattagcatcttctagggtgaaagtattgaaaacaaacaaataaaaaataagatggctaatgtcactttggagaccagatatttaaaaaattcgaacagtcatgggaaagttgaagaatttcaaaaggaagtattgtagtgcaggtgtcctctttgccagcagttttgttttaatgttctagacatattttccactgggaaccaggaacccatgtttgctgcctgcttacccccatgtacttgctaactgtgccagctgccaacagaaggagatgcaactgactggctcatggatcaagagctagattgtgagctacacactgatgacacctgttcccaatgagccattaaagccatagggtgggcaggagttgagctgggagcatgagatactagcaggaagaatgctgatgaataattcatccggaatgcatgccaaagatttggcaaccaggattgaattgaaattaactccaaggtaaagctggcctgggaaaagatttgtgggttggtaggcattttgaggttatttgtgaaataggatgtgtacttatctattgaggacttctttctctactggttaaaaatactctgttgatttaatggtagtttgcactttaaatccttaaaaacaaatttaggagtacaagtattaaggctatttaagttaacaaatatacaagcaatcacattaaatgggcatataaacacaggaatgtcaagtactccagatgaaacttttacaaagttattattattactatttaagatatagtcaacctctttaagataaataatatgctctgttctagttttttcaacacttccaatagctcattttcacctagagccaaggctaaggcagctttctgggggaaaataaagtgctgtttaaactcgtcttaatccacctgccttattatttaatcagtacctaatttaaatttgaaggtcaactagaccaaatcatatgctcattaatattaaaaacaaaatcaattaatactcaggtgcatacccaggcttgtattcctttggaacaccatgtaagtcatacaattgctgtttttggtatttatgaaatgggatgtcacctggcaaaggatttattaactcttgatctagtttcagacctcttagaagtcaaaattgctgtaggaaaaggggaaagctagagccaagagtcagccttgccaaagtgaacaaaagagaaagactacatacaaggaagagaattcaggagtgtgcaagagatgagagcacaaattattccaaccactgagcactgtaggcttggccagtggtgtggactcaaaattgctctggaaaacggcattgtttctgttctttgcctgaactgttgaggagaaacaaaaccaaggccaccaatgaattcctctcgagactctccaggctaatttttctttgtcctattcccattcttggtgttcaccatcccccactaagcgtcctcaccccatcactcatcagagtgaggacaaggctgtcctgtgccctggatctgcattggtagagtgtctgaatatgcttgagtatctctgagttatccctcttggatattaggagccttaagtgtagaatgaaagtggctgtcctctgctagtatactgaaggggaaagaactaagatacattgagtgtctcctgtacacaatgctttacatttataacaatgtagtcttcatttctcaaaagggtcacctgagactcagagaaggagagaggaaaagggtgtgtgtgtgggaagtgaggataagaaaatgattttattatggttaaccgccgtacctaatacctacataagcttatacaatccctttaaaaggtagtatttatcatatttttaatataaaaattatttttgcttataagaataatatatctttattgtaaaatattttttaatgtgaaaaatatacaataaaagcatatagtcattttccctttaaggattaaactgtaggaaaataaaagtctttattctattgcttcatttaacaataatactgtgaatatttgcccatgtctttagaagttcctcaaaggcatggattttattggtgtcataatattttatcatctggttatcccacaatttacatagccagtgccctaatgttagataacttagttatttatagttttcttcctattacaaataatagaaaaatgcagtgcctacattttggataaatctttgtgcatatctatgatcagttcctcaggacaaattcctggattttattgatttacgagggaaaaggttaaaacatttgtattacttacatatattttcttattttaaaagtaatgtgtgtttattacacaaaaaaaataagcaaaagaaggaaggaaaaatatcactcataaccctggtgcccagaaataagcatatgtaatatactgatatataaactctcaatgtttttctaggcaacctcatacatatatggaaggggtttttttagggtattctgcaatgcataaaagtttgaacctgtctttcaaatataacagtacattgtaaaattcttccaacatcttttgatagtctatcatcatttaattgtgtattccagtaaataaatgtttatattcttatccagtctcaattttgaattgtttctgtggtttcagttttaaattccatactgaccagaaacatccttttaactttgtaaaatgatcatgatcatttctgtaagaaaattctagtaaatgtgaatgcatgcaaatttgtgtgttttctacaatgaatagttttttaatttttttggttgtttaattagtatatttattgtataaaattcaaataatggaagagaataaaaaatattacatataatcacatcacccagagacaactaccattctcattttggagactatctatcatgcatctctttctgaatatatgaacatacacagctttatgtgaaacgtatgattgtaatgcaatttttctctttttgttgcttatgtactcctcaccattcaatcactcagagagtaaaatacatggactaagagtctaatctcttcttccaactacttgggcccagattccaaccctaccctgactaagctgtgtgatctttcgcaaattatttagtctttctactcctcaacttgagtttcctcatacataaaataagaacactaatagcacctacctaaaaaatatttagcattaaaatcattcagtccatttaaacattttcaaggtgttcctggtacacagtaggaggctcaatttttttagtcattattaaatatatatatgtttattttacaaatattgtattatattccacataccttgctaaatcttgctctgctacaggcagccaaacttggtggaagtctctgccagtcagtttgcaaagatctaattaatccattttaaagctcacatgataatccatagtttggctgtaccataatttattcaaccattctcctatgataaacaagcactttttttccactctattgccacatagactatgctgcaatagacatctttgcacacatatccttatatgctgatgcttttatttgtatggaaagattccagaaatgtgagttctgctttcagcagtatgtgtttttaatagatgttgccaaattgctttcccaataggctatagcaattcatatttctatcagcaactgttatttttgttctttctgatttttgacagttcaatggatgtaaagcaatctctcattattacttttaaaaagtcatcagtgttattatcccaattttgcagataactgaggctcagaaagtttgaatagctggatcagtttcccaaaagctagaaccagaatttggaagccaaatctgtctgaacccaaagcccatgcattttctatccaccatgctgcctcccgtatcatgaatttggagcagaggactttctttgcctgagtgggtaggatgcaggtgtgtctagagaaggcagagggtgtcatgggaaccctgcaacctgtgcaaggtgagcagggattggaaccacggcaacagggagggcagtttggagctagctgcttggtccacctcatgaccttgaccctaacctaggaactacaatgaaatgagtacacagaaacctccagtcatgcccctgactagatgtaaaacccaaagcactttgtattatattcctggtccttttgtgcttccttagaccctgcacgtgccttacgctatagcccaactcagttatttgtcctttcccaaatgccactggtctaaagcattctgccctcacgctgtcacatccattttgttctttattctgtatatgaaaatcctgatcatttttcagagtcactctcaatatctttcttgccctaactagaacctttactccatccttccctccctcccatccttccttcttccatcacaaattatctgagcaaacattacattgacagaaattataacagataatacaggtgaggggggtggtgcatgcatattttcacctttcttgatttctgttctcttcattacaattcaccccatagagtagtaactatcctgcttctcataaattcgtttataaaccttaaatgttatcatgaactatattgtatcaatattagttatatacttatctaactcagtagaatgtagacctcttaagagtaggtacaaaatctcattcatttttatgttctccacaaagctcaatgcagggggccagcccctccacacctgtgggtatttcttgtcaggtgggatgagagactgagaaaacaaataagacacagagacaaagtatagagaaagaaaagtgggcccaggggaccagcactcagcacacggaggacctgcacaggcaccggtctctgagttccctcagtatttattaattactatttccaccatctcagcaagaggaatgcggcaggagagcagggtgatagtggggagaaggtcagcaagaaaacacgtgagcaaagaaatctgtgtcacaaataagtttaagggaaggtactatgcctggatgtgcacataggccagatttatgcttttctctacccaaacatctcagtggagtaaaaaataataaagcagcattgctgccaacgtgtctcgactcccgccacagggcggtttttctcctatctcagaattgaacaaatgtacaatcgggttttataccgagacattcagttcccaggggcaggcaggagatagaggccttcctcaatctcaactgcaagaggctttcctcttttactaatcctcctcagcacagacccttcacaggtgtcgggctgggggatggtcaggtctttcccatcccacaaggccatacttcagactatcacatggggaaaaaccttggacaatacccagctttccagggcagaggtccctgcggctttccacagtgcattgtgcccctggtttattgagactggagaatggcaatgacttttaccaagcatacagcctgtaaacattatgttaacaaggcatattctgcacatccctagatcccttaaaccttgattccatacaacacatgtttctgtgagctcaaggttggggcaaagttacagattaacagcatcccagggcaaagcagttgttcagggtacaggtcaaaatggagtttcttatgtcttccctttctacatagacacagtaacagtctgatcgctctttcttttccctacactcaacacagtggcttgcacatagtaggtcctcatatttgtttaatcaaaaggaataaaatggtgtgtacataacagtttctataatgctgttgatgatttaacagtttcttggagaatttaattgagagccttgcataaaattagagacttcacatgactctagaaagtatgaatgggaaattatctggaattttttccacaagaattaactagagaattggagatagaacctatcatagaaaatgggccactttttgctggtgcatccaatgttgatgacatcgaaggcacccctcctgaggaaatctcaactgcatgacccctactatgccccaattcagcaggaagcagttagagcggtcattggccaacctccccaacagcacttgggttttcctgttgagaggggggactgagagacaggactagctggatttcctaggccgactaagaatccctaagcctagctgggaaggtgactgcatccacctttaagcatggggcttgcaacttagctcacacccaaccagtgaggtagtaaagagagcttactaaaatgctaattaggctaaaacaggaggtaaagaaatagacaatcatctatcacctgagagcacagtgggagggacaatgatcggcatataaacccaggcattcgagccagcaacagcaaccccctttgggagctctgttttcactctattaaatcttgcaactgcaaaaaaaaaaaaaaaaaaaaaaaaaaaaaaggaaaaagaaaagaaaagaaaatgggccacttttaattctaatattatagccactttcccaaatttgttttttactatgattaagattcctaataaaagaaattccctttcagaattctcttgtttcagaagtaaattttcccaaaactttcacactgcagaaatataaaagtacattcaagcccaagacttttcctatttgttcactttcagactttgatattcttcccctctaagagaataaaataaacttcttttaaggaagtacatgtttatctactatttaatatagtttaaaatattcctaagtggcaattggaaggtaagtggtagttcctttccaaatacactttaatatgcatatattacttttccttactaattaagtatggctataataatatatttgtaacagtcaattccattacatgctctcttgggacatatttctaaagatcttgtgaataagacttgtaaacaaaatcatcctagactaggacatggagattatttgaatgggtttacaattcctttgtccaacatagtgttttggacctgaatttacatccaaataggtccaaatttatatgagcatccttgtgataattttcaaatttagtggccttgtttttgaattccttgggccaagccatgaagtctttatgagtctcaatttatttcaaattcacatcaccattgctgtgtggccttaggtaatgtttttagcttgtgcctccgttttctgatgtgtaaaaaatggaattgtaatagtatttatatcacagggttgctaaaactgaaagagttaatatatttaaagtgcttacagcagcttctcaaacatagtaaactttgagttggcagcattattgttttttacaattattgttattacatttatttgctggctttaaaatcctaactaccccaggtggcacagtgatatgtcattgaatcatcaccaaatcaagaaatctattgatatgctaacgcaggttagagaggttcagtaacaggtaacattcaaaatatttaacaacagatgttgcccagcccctgaccatcaagatgagcattctccagtacaccatagggcgtgcaccagttgagtattgaaaagcaaccagagtaaactatgccagcaagcagaaacacctaagaaatctctacctagcccccattccccagtggagatttgttaactgggtatcttcgcttgaataccagacattccattggtgccttccatagatttttctgcctgctttgtgttttattctcttatagataagacctagaatggaaggtgcctagtccatattttgaaatgcttttgtgggcatcacctaataaaagtaatcatagatcttcaaaaccagcacaatttttagagtgattcgcactctactctaccagaataattataccagaattgacctgattcactaggactagagaaacccaagatgtatacttacccaaccaaaaatgcatgaagtcttttctgtctacaaattaaaatcataatatctctgactcatatttttaaatgtttaactttgactcccaaaagtgtactatttttaagagtatgtatttttctgaccctgtcatttcttgttaattagtataaaaaataatatttggagtaactctttagagtatttccacaaaaggtggtgtgtctagccaatctgagtaaacacaaaacatttactagttaagtgtagtctatttttctataaaatatcatttagactagctcagtggttctcaaactttaatgtgcattggactcaaatacacattaatatttgaatttaaaaataaatactgtaatttaagagtttttaaaagtatttccagagttaattttgaaggtatgtatttttgacactaaatagataggactgtactcagggcaggtggattctgacagcagcaggactctcatagcaggatgaggaaggagggtgtgttaacctaacaggagtggcctctgcccaggagtctccacaaggccacagaaagcccaaagatccatgtgtcaccaactgatcattgtaaataaagtggacctgcttctttaaccctgtcaaaaaagacaaaaacaaaaactaaacaaagaggtggctctactgaaaaacagaaatcatgacaatagttcatgtagaatggcacgtcattgtattttgactgggcaaaaatgctggaaaacggcacttcctttgaagtgaattcagatctataagcaacacggtggggctcttgctcagatattcccatgtttaaaattttatagcatctttgatgatattaataattgttctttgataaatgagttcagcagtcaaaacattttggaaactacgaaattaggcaaagttaagtggtttttctgtaatacagaactcagagccttcagcatgctaacatgaattgaaatgctcaggggagatggaagtatggggcgtttcccacgttaattaactaaatgtgattttgtgaaattttgtttgcttgctcgccccttttttgttggtagaactttctaaaagtcatacaaaacacagtttgggaaaccattccacatcccatctggaagaactcaagaacgcagtttaaagttttgattttaagaaatcatacccattgttataatacaaaataggcaatggtaaattaccttttaaaaatggagtctggccttcttgaatttatggttatggagtggtatcggaaaaacattctctcaagtttcagaaagggatgtagcctatcttagtttttgacaatagattttcacaagcaggaatgttttgctctgactcttttctaatgacatttgttgtcagctattctgccactgttcctaggaggatatatttatctagacacacacacacacacacacacacacacacacacacacacacacaaagagagagagagagagaaagagcacaggggaagatgtctcaactgctgcattctttaataagaagaaaggaataattggctggctagtggcaagactggaacattttttaatcaagtaaaaagacaaggtttaagcattgatggcatttaatgagaagattgttttcctatttcattttgaaattagccctgttattttgcaccagatgtgtcaaattagaatggaaaggcaaaaattgattattttcctcaggcacaaggggcaatgacactcacataaacatatatgtgtactcaaaacaacatgcaagcgcatgcatgcacacacaccctgttttgagaacaaacacaaatatgtgcaaggcgatatttctcccagcctgactcatacataaaggtctcataaagatctatggttttcaaaaagcatgtaaacccattacactgtttcaatttacgtaaatcacccgtaaatgttatctatgccaaccacacctatcttaaacacggaatgaggcagaatcagttactaaatattcactgaattctatcctaaacgtgttatgtgatatggtttggctatgtccccacccatatctcatcttacattaccacatgtagtgggagggacccggtgggaggtaaatgaatcatgggggcaggtgtttcccatgctgttctggcgatagtgagtaagtctcacaagatctgatggtattatatgggggagtttccctgcataagctctctctttgcctgccaccatccatgtaagatgtcacttgctcctccttgccttctgccatgattgtgaggcttccccagccatatggaactgtaagtccattaaacctgtttttcttcccggtcttgagtatgtctttatcagtagcatgaaaacagactaatacataatgagacaaatatttctgtcaacctcttcctcagggtggatggttaaagccttgagaccactccaagtaccaggcactgggtttccctgaatcttccttcatggtttcaggaaaatcagaaaccattttttttttttatcagtactgcatctttctgcatcctgcttctggcttccagcttcttgcttcctgcagctttctgcctaccagaatcctagtgtagaccactctagacttggatatccaaccacctgatttatcatctaatactgacatataccagcatcagcaggaggaaaagcaggtaaacaccaccaagcatccagctcaagcttaccctttcgcacgtacatctccctcttctccacagtattgtccatggtcaaagcccctcccagattctttcctgggggcttctctcaagttggagccaacagagcacaccagactttaggggaacacattagttgaagagctgccctgtatcttccagagatggatgatattgtttgtatttccctaattttctctaattttatccaaccaatacttaggttgggtaacatgcctgaagccacacaagttgaaggctgaataatagatttgcatctaccaccatgccaccctgaatgcacctgatctagtctgatctcaaaagaatagttttgagaagagacttttcgaaaactctcccatttctgtgggggtttcttttccttatgagtctgctcatgataaacatacacaatggaatattatttagccataaaaaaagaaagcctgtcattcgtggcaacatggatagaactggagaacatgatgttaagggaaatgagtcaggaaaagaaagttaaacaccgcatgttttcactcataggcagaagccaagaaaggttggtctcatagaagtaaaaagtagttcaggatactagaggctggaaaggggagggggaagtggcagggatagaaagagatgtgttaaaggatacaaaattataactagatcgaagaaataaattctagcattctatagcattataggatgaatatagttaacaataatatacattatagtttccaatagccagaaggagtatattgaatgttcccaaaacaaagaaatgataaatgttccagatgatggatatgctaattaccccaatctgatcactctatattatacgtattgaaacatcaccatgtaccctatgaatatgaacaattattttgtcaatttaaaaatgaaataaatttatttcatgtaaaaatttagctaaaaaaggaaacacgcatacacataagttaaggcttttttgaatctcagctaattcagcaaggaaaaaatgagtgataaatacttgattttgtaaaaacgtttctgttttcaaggaaaatagtatgtttcaggttgtctgctgtttttaaagtcagtgatgcctagaactaaatgatagtatgttttgatttctgcctgctctgtgttttacagcagactcactctataatttttattacattttcattatttacatccttattccaaaatcatatttgaagtcgttccctcaaaactgacacctgttatgaagcaacagggtctttacataaattaataaatgagaatgtcacaatggaggttcagatagaaccctgattcatgaatttgctcactgttttttcttgtggcagaaaactaattatatttttgatcttggagttcacacatgcatgtgttaaacagatagctggctttaatgagcccaagattaagtgtttatgtttgaaccctatataaatgagcaaacctttatataagtcaaagttcagggtcatattaatatattgcacttgaagataatttcatttcataaattgggtaaaaagtctatcaccattaccagacaaagcaaagtaaacagatcccagcacactccttcttgaatgcccataataccctcaggtttccctccaagtaaaatgcaaatagctcactatagcctgttaggtgcacctttccattgcagactttccctgtctctccagtctcatctcgcacctctcccactcctctcattgtgcttctgcctcaacacagctttctctggtcatctttttggtaaagccacctccactaaacctccatctcagcctcctatgtgttgctttataacactcactgccatctctaactatgtaaatctttttctgttgttgtttgcatgctttcctcctatccatctcccactactataatttaggtttcatgagtggaaagacagtatttatgttgtccaccattttatccctgtgattagtacacagtatggcctacagaggtaccaattaaaatttattgacatctcttatggccatcaacagatatttattgggtcttaacttttttaagacattatgcaatattaaaaagaaaatacagttcctgcctttcaaggaatttacaatctagatggaaatatgagatatacaagcatgtgctacatagctaatatcagcaacaataatatcagcagctaatatttatcaaatccttattatacatcagtttctattctaagaactgcacatgttttcatgcctactgctctcatctatgatatgaatacaattaccatcccactttacaaatgaggaaagtgaagctcacagagcaataacatagctggcctgaggccacataactaggttgcagggcagcaaagaaagtcagacagatcatggtaagtgttaaaaaaggattacattgaaacatactaaggagcttagggttgaggagcatctctgcttggggttgtctgtgaaatgtgggtagagaatatgagatttgggctgggatgtgaagggtgtgcaaatggaaggtattctagttgggaaaaagagcatctttgaaagattggaagaaggacatcagaagacctattttaggtacaatgaataaacccaattgacttaaatgatggatccatgacccactcattaattcgttgctgacacacagtcctgattatggaggactctgaatatcagactaagaaatttaggtccaatcaacataaagcaaaaattttcaaccattgggtattgttcaggtgtaaggtggtttgggtagctgttacaaatgtaccattctctttcatcctccaattccttctcagaacattctctagttaggtcttcttcccagccatttctgtcaccatttgcagatgcttctctataagccaaattagatttcctagtttctaatggatgatcctttggcaagctataattttccatcttcctaattctgcccttcaaataaacacgtatttaagtatttgtataaatcaggctaatgctaaattatctagaacagcactgtccagtagaaataaatgtgaaccacaaatgagaactacatattagtagttttaaattttcaaaaaggcacactaagaaaaaaaaggaaaataattttaattatacattttatttaaccattatatccaaatagaatatttgcaaaatgtagtcaacataaaaattattgatacatgcatcaggaagaatagctaatggatactgggcttaataccagggtaataggctgatctgtgcagcaaaccaccatggcatatgtttacctatgtaacaaacctgcacatcctgcacatgtaccccaggacttataataaaagttgaaggaaaaaaaaactaaaaataaattattgatacaatattttacattctttgtatgtgtatgagctaagtctgtgaaacttggtgtgtattttatacttacagcatatgtcattcggactcaccacgtcacaaatactcactagccacatgtggctggctggtggctaatggattggacagtgtctggatttagattgatgagaatgtgttgtaggaattgtctattacttttagtctttaagctttgttcttaaggagttcttgcctgcagagtttgatgcaatcagtaatgatatgacctgagcctttcttgattccacagattagtttgttgttcttcttcttcttatgaatgcatgccaaccaaagagtttcagatttttaacagtaagacccactaaatctaatgtgaaggagagatgctttgaaaatatctcttatatcttcacatattgatggggagctcccagattctgtcactcagagagctgtgcatccctcctcatcacatgttagaggctgctctctctgtagtggaaaatctgtgggcagtccacgtgaggatacttatccaaaagtcctactttaaatgaaagatgtcttagacacaaaaacgaaatgcatacagatagatacaaattcagtatatgctaaggcaatggctctcaaagagtgttccctggaacagcagcagcggtgtcatctgggaacttgttagacatgcaaattctcagtccctaccccagaccttcaggatctgaagctctggggttggggccccacagtctgtatgctagcaagcccttccagggatcctactcctaatgtacactaacatttaagagtggctgtagtaacaaaataataagttggagacagagtataggagagcggtgaatgttttatgtttgaaaaagaaaaaaatactattcttactcttcaaaaaagatttaccgtagaatctgctgatgtggccagccttcagagtgcaattaaaattcactttcacatgcaaaaatatgaatgaatttcacaaacgtaatgttgtgcaaaagcaagaagacacagaaaaggacaggttatgtgtcattcaatttacgtcaagtccccaaacaggcacaacttatagatgctgttgagagttagagtggtgatgattagagtgagggtagtggctggaaaggaggataatgggtagaaaggaggaaaatggtagacatgttctactgcttgagctggtcctggttatgcaggagtattcattttgtgataattcatcaagctgcacacttaagaattttgtactttaggtatgtttatattcaacatacagttaagaatttgaattttttacaaaaattatgaatgcaacttttgggaaattttttagtaatgtgaaaaacatgcactttaatttggcagtctcacagttgtttctcctaaataacaaatagaggtttacctttaaagtgacccacttcatacgtctctaggttggagcataaacatacataaccttgatgctctctcatgacctctgtttaattaagatccttccctccctcttggtccctgctcaatgccatcctctcctgttctcagctgactttggactaatctttagcaactagttattaagtcattactccaaatgtcacaagtgggatccttccaaggagctctgcattttaaaaagtctcaaaaggcattctgcccaaagaaggaagtctcctctgggaagtgtgaggggtcagggcgggtacttaggaacagatggccttatctggcccccttatatctcccaacacggtggccatcagcttcacctaccaacgaggctggcctgatctgattgcatgagttttcctctccagtgatgtagggagcagtggggtggtgtgggtgtgccaagaggcaggggatgtgctgctggcctaaagagatgtggtgttccacacagaaggactaacccaaagtttttgctggttctatttgcaatggtgctttatcagataaggaccacaaaataagaggttatcacaaatatgtttgaggattattcagtccttagattatagactcttagggaaagctacttcttattcttttcatcaatatgagaacatcagagacttacagttaatgaaatactctcattactttttggaaaatttatcaatatatttctctattatacacagaactgatattccgccagtacactctaatcctgctgcaagcatttttaaaatactgaaacatttacatagtgtccggcaaacaaagattaatgcctctcctttcaagtgacccttcccaccacctccctgccatcctaggacaccagcagggctccacggccttgccccacagctgtggacatgtgcattctgattagccaacaccctaccagttattaagtgttttgaatatctctttggattccctcatgactactttatccgtgctatacaaacactgacaatgtggtgtattttaaggatcaaatgaaaatgtgatgccagagaactgaaatggagaaagagaaccttggacttgggtaaaatcccatttccaaatctattctgaggccttcttctgatgtgcagcaggtatactaatttgaatggctgacattcaaagggaaataaaccatccaagtatccatgtgcacaaatgcatatgtcagtgctgtggacttcgtgtttgtcccctccacccccaacaaattcatatgttgaagccctaacctccaacgtgatggtatttggggataggacctttggggaagtaattgaggctagatgaggttatgagggttggtccccacgatagaattagtgtccttataaaaagcaggcacacacactgaggaaaggctatgcaggaacgtgaccagaaggcggccatctgcaagctggcaagagagccttcgctggaaaatgaactggccagcaccttgatcttagatttccaacctccagaactgtgaggaataaatgttggttaagccacccagtctatggtattttgttgtgtcaggccaagctgacaatatagtcattgcgttaggaaaatctattataataatttctagaactcatagttaagcctactctaataaaataatagcagattaaaacaaaatccttctataattgaaaataacacttttaatttaatcttaagtattcttcttaaggttcttgtaagttttttacagcattttgttttaacacgtttttctcagtttatgaggcaaaacattgttcacattatacaaatacctctgtacaccctatttcctgtaataccagatgtcccctgatttttttctaccatcagggtgatatttgaaaatgaaatttactgaacctgttttactttgtatgaccaggctgtttcgtctttaattttctgtaagttaattggcataatgcctttcagcccatgtataagtttcgtgagtactgtacagtttgaaatgactaaaaaggtgagtggtttttacaaatggatctagaataatgccaaacttcttaaagtaatatttgttttttgtttgtttgtttgtttttgagacagactcgcactgtgtcaacccaggctggagtgcagtggcacgatattggctcaccgcaacctccgcctcctgggttcaagcgattctcctgtctcagcctcccaagtagctgggactacaggcacccttcaccacacctggctaacgtttttttatatttttagtagaagcggggtttcactatgttgaccagtctggtcttgaactcctgacctcgtgatctgccctcctcagcctcccaaagtgctgggattacaagcatgagccaccatgcccggcccaaacttcttaaagtactatttgtaaaaaaaaacactttagaaatgtttaaagtacatatacacattaaagttaaataatgaacttgcaagaaccacaaagtgagttagactatttcaggttatacaaaagtgatacacactgaggttgcttggttggcaggaaagtcagagaatgaggaaaccatttcagcagccccatgaactggatcacccaggaggcaacagccattccatcagttcctctagagactcaacaactgttctagtagccatccactcaaagagctgatcaattcctttcacagttaagtgaatattaattctctcctggtatgtggagctctcatgtcaggccaccttagtgtctgttggtcaagcaagaggtgtctgcttagggcctattactcaccagtcatctgtgacccagctactagggtcatacagtgcaaaacacggtaaccctttttcccaacttgccctaattaggtggcagaaactttccctaacactccataattaaagacagcatggtgtgagagagcagcaggctagaagtcaggagaataggatgagcattctcatatttgctactaagtggtaggagccagatgaaggactatcttggttttctaagtttcggatccacaaaagcaaatcggggacaagattgtgggtgcaaaaggtgaacccactttttatttgggaggtgttctcaggaagcacaggtgaggtgtgaggaagtgggacagggaagggaggacagcccctaggggatattaatgatcaagttactgctgagggaaactgagactccgttcccctaagagatgtatagagtgcattcagaaacatctccctgaagggtgaggaagctggggtatttatctcccaaatccttgggggtccagagctgggcattaattcctggttacttctggcccatccaggacaagagtgccctctgtactggcaccatcggctccaacctcagggatagtccacagggaggtgggtggggcacgttggctacaaggcttagcttgcatgggctgtttttgttctcactactctagctctagaaagatctagcctctctagatgtcagaggtggagatagttgggaaggagtaacagaaggagaagagtgaatccagcctttgaacctttactacaacaatttataattttttagaaagtccccaaattggatttaattagaatgtccagaaatagaaacgattgtaaaatagcatgcggtagagccacacgatgagccactctgcagccacccatattttaaaattatattcaatggcatggagaaaattgaagaaagaaaaaaacagaaaaagtaagcacatgggggaatgggggcccatgatttcgcctcagttctttctcactcaggtgagtttgtggatccttctaggtgtcaggaataaattgatgttcgggagaagtcatacaggtctttgaagctcaacatagtatctcccacaaaggacccaaatgcttgtctcactctccaaacaggtgcctttacatttggaaaaaaaacccaagttctgagccaacaaggtaggttatatcttagtccttgaaattcttggatctcagcagcaacactcagccacactttccaagtgtctggctaaaagcaatctgagcccagcagttgctgcatttatgaatctggagagaaattctgtctcctgcctcaacttctccgtaaaataaaataactcagaagcagtgacccgatgccaggctgtcggttcagagctaaggccacaaaagcctttatcatttttcctaagaaggttctttcagtaatacagtcaccatgacctttcattatcagatcaaattaagccaagctgtaaataaaacacttgtactctcccagatttatagatgaacattttaacagaattccaagccctttacattcagaaccatagatacttctcacacccatggcctggtaagattttattttttaatgttatcaagagagcctgtggtgtgaggcttagtaagagagagggaggcaagatgagaaagaaatcagaaggatggaggtcaaggatactgaaataaccaagtcacagacaactgaaaataagagcagatttgcctttgtttacattgccaaatgggaaaaattaacttgattgaaagggtaattaagcatttctttttccatcatggtccaaaccagcttcatattccagctgttccgttttacattatgatgattctttgttgagtcgctgacttaaagacagccagtgtggcactggtgcacaccttactgcttctcccactatcaacctttattttgtaagtacacagttaaaatctcagtgagaacggtccaactcaggtaggcggatgatgaaggaagagtgggaacatttacaaagaagtgttgctggaacaaagagataatttgagcaaatcagattagctttgtaaggtatcttagagagattatccagctcaacagctgtagttcctaggtgcagaaactgagattatgtaaagtgcctgaatttccctagagttatgaagcttgtagctctaaattctgaatcacaaccctatgactgcatctctcatttgctagtattttcaataacaacttgcagaagaatatcaccttcaatgtaagaatgagctatttcacaccagtttattgtttgaaatttgtgttttctaatagaaatcaaattaattgtgcattatggtagttttcccagccatgtctcaaagactgttagcacacagggtgatgatccctaatttgaaaatccaaaatctgaagcccttctgggcccaagcatttcagataaggaacatcaacctgtccctgaattccatatctctgggaatgattggccatcttttaatggaggttaatgagaccgtaatgaagacaaatgaccaactatagctcatttgggtctcctgatgccctgagcaatgtcctgtctgtgggccctgttacctttcaggtaaatatagttcagccttatttatccagcttcactgggaccaagcacagttcagatcatcagcatcagaatagtctgggaatgtgttgcaggatacttttttcctatataaaagagtagccgctgcaaagtttcagtaagaacattatctgctggagagactctagtttatttagataagcacctggttcagatggaggaaaaattactttgtcctaattgctccacataataagccagagattctatagagcaggccaggataaatgttttgcatagtataatcaaatcagttaacgagaatcaaagaaaatccaggtgatggtgtttctgtgcaatttttgcatcaagctctggtactcatgtgtagacatttacgcattacagagaaagactattttatgtgtaggtttttgtgtatagcagtttttttttggttcagacccattagaagttctacgccaaaatgacctgctgtcatcactctgaataatagtcaggggcttcctctcttactcggtgcgttttttagaccacctagcttgaatagttatcttcaaagacagtgaatcatgcagttagttttatactttatattcacctctaattttggtgcaacatggttttttgccagttggattgtccctctcatttatttaacacatctctatatttgctggctatttcctcaaatcaaatctaccttaagaattcaagatttgccatcactgattaattcatggagcaggaatcaagctcagtagctaattcctcaaaactggtctggaaaatcttttgtaaaatggcaatgtcatctttcaccacagcttaaatccatacatgtaatattctgtgtagatacgtgtaattgactgcattaaaagtgacctactttttggaatttctgttttatgaagtttttcattttattttaatctattttaaatattcctttaaaccttttcaactttctgagtgagggctttttcttttttaatttatgaaagtgtttcttttttattcttgttaatcttaaaagcacatctatctacagccctttggcttgaatatttgatttaatatttgcatttgaaaaaattctttaaatatgacattgaccttaaagattttgaaagtcagaagctacatataaatttaattccagttctctgttattaaaataacattgactgaatctcagaattaggtgataactgttttacatgtttttgaacattaccaaatgataatttttagaattaagtaaaatgcaaatccaaggtgctgcaagagttgtatatgcaactacatttttcagggtagtttatagaacttacatggaaataataagttattttagtgaccatatacactggtgtcttcgtccaggctcctacaacaaaataccattaactgggtggcttataagcaaaagcaatttatttctcacagttctgggggctgggaaatcaaagatcaaggcaccagcagattcggtatctggtgagaactcactttctggttccttctaactgtgtcctcatttggtggaaagggtaaggggactctctgggacctttttaaatctttttataagggtactaatctcattcatgaagcctccacctttatgatccgatcaccttcctaaggccccaccccctagtgccatcaccttagcagttagactttcagcttaggaattttagggggacacaaatattcagaccatgaatatatgcattttctttctccatcattatgagtaaggatttcacgtacatattcaatgcagctttcatcaccccctaagcagaaaagctgcactgccacttcaaacctacaactaaatataatgtaatgagatccatgattgaaaacatacagaatcaaatctaggcctgctaaaggttatgagactagaaattcagagagccctattaataaagtaactttcgtggaaaccatcttccataggtacctgcttatttgtgaatattgtcatgaggttatatagtacttttccttctactttattgatgtgtgtggaggtagaaccatttctggagcaaagtttcacatacgtgacagtgaacttgtgggtttggtggtgggtcgtgctgatatgacatccttgtcatcacataaagacatgtatatttgtgtgcacacatcgaatatactgcaatggcatgtttctaagatgcacattctttcatatattttatttctaaagtcaggacatgtcttagaattgataatgtgttatagtgcatctggcagcattttcttctaatactacataaaataatagtgcaaagaacaactgatggtatcttggacgcaatgaaatgcattatgtagaaacatatcagaaggtgcattaataatgttaaagcaactccccaagaatattgaaattacaaagataacttatttgctaaagacacagattttggtgataaaacagatacagtctggtgagtaatttttcaaatgcttttcgcccatcttatgtgactcattagatcataaacttgtaaactcgatgtaaatcaccattgaggagacgtttcttatgtaatatttgggcagaatcataatgtttatgtaacattatgattaacaacagtgaattattattcagtgtaaatgaataaattttaactaaacataaaatcttggataattctataacattaatgttgagagaaattaatgtggtacaagactaaatatcaaataatataatttttaataaataactaaatctaaaacactttcaaatttaaaatttagcctgatctatatacctttttaaatcattgtatatttttagtgttaatgtgagaaaaatattcaaaatttttttttcaattgacatcttagctccaaaattaaaagagcatattttaatgggagctggtttaaaacaatttgacataagttagataacagtttggcaaatgtgtctgtgctcagttttgcttccaaatttggacttttagacttattgtcagcctcagaaagaaataagaagctgtgcagataattaaacatttgccttgggggaattatttgtagttaattaaaaccacacacttcgggtatatattgatacttgcttcactggttattaaatttgaatcatatgttaactacccaggtttctcacttgtccatcaaatgttgcttgtggcaggttcaagaaacaaactttctcataatattccaagccatattgtttaaagctatctcctaattttgagaggaaatgaatggagagaaacagagggagaaatgaaaaggaaacaaacaaagaatagtttattttagactccatctgattcagctctgttggggagttaaaactcaaccaagtgacacaaattcagtagagaacacatttgtaagtaatcaaggtgttgctgtaccacccccagctttctccatggtcacacgcttacaagattagcttatgacttttagatatctttggattgctttcctttcagcagcatgaaaaatatctactagactataagctccatgagggcagagatttggtgttttgtttcctgttggctccccaacatcaagtacagtgtctgggcaggtgtgatggctcacacctataatcccagcactttgggggtatgaggcaggaggatcctttgaggccaggagttcaagaccagtttgggcataattacaaaatcctgcctatacaaaaaattagaaaactaagtgggcatggtggcctgtgcctatggtcctagctactacagaggccagaacaggaggatcgcttgagcccaggagtttgaggttgcagcgagctacggttgcagcactgcatccagcctgggtaacagagcgagaatctgtctaaaaaagtgtctggcatatacttggccattattaaatgtttggaaaatgaatgagacctacttgctgtcttcctgttgatccattcacaggatcattccagtactttttaaagagcctccagggaggcctaaacatttagcaaggagccctttgtagttttgcaatagcccatagtcacagaatccttttagccatgttaaacatggatatgtttaaccatatcctataacaaaaaaagataagtgtacaacgattccatgtttaaatgtgctaagcgagggagggaatgaccttgcagagaccagaaggtctgcattccctctatgctattgttctactgttatggttcccgaggaagatgaacttaattaccactggatttcaaggttctgtatctgactttttcaaggactcaagactcccatatgtgagcaaccacagtaatggaagcattaagaacattaaaattagatagtcctttaatcttcttcattttgccttccttttatgtcctttcccatagttctaagactttccctgatgcaaaaagcctgcttttattttcttatttgttgcaaaaagacatcccagctagctacatctctacctttgtaagctttgagcagatatctcacatagtatggggggaaaaaaagcgcctatttattggcaaacatatgtatttgagtggttatttttaaaacgaataaattctatttttcctcaaacataaatctatcatgttagtgctgaaagctgctctgtttccaagttaaaaatgctgaccaaaggttttgcttgtttgttgttagattttgcaaaggatgaaaatattacaaaaggcggtgaagtgacagatcattctgtgcgtgaccaagatcatcccgatggtaggttgtgaaatcctttattagattttcttttcttctgctgggaaacagaaaaaaaaaaaaaaaaaaaacccacagacttgaatttttctggaaaaatattgaattccaataacactttattagcactgaataccagttgatcagtagctgccatctttagatgacacttttgctttccagaatcctcatcactcattacttttgtgccaggctggcttcatttattttgtttattgttacttgtctgaattctataagcactgggtttgcaaacactgagatgaatgtgttataacaatgagaataaatattttcattgaaaaacatggagaataaatgcaggggattaaatccacatagtcttgggatatcaagaagggagtacataacaaacagaaatgaaacaatctttagaaaaataacagaaaataatttcctaatgtaaaccagttcttccacccaaaacatgacagtacacattatatttataggcaaaggaaaaactcagaacagacatctgcatagcttcatggaatttctgaagataaatgataaagaaaggcttttcaagtgtagtcaaaatcaggtagtgattaaaaccaccagagtcagattagccttaaccttcttcttccacaaccctaaaagctagaagaaaatggagtcacagtttccagagctcaaaagggcacagtttccatagttaatgaagttattatttatacatgaaatcagagcaatattttctcaggaatacaaagattaagaaaacatgccacccaggtaccctttctgaataaactaacagaaggcctgagcaaaaacaataatatagaaaggaaggcaaaactcaagactgaggaaggcacattcgaaagggactatatggtaagagactaattaaatgtacaaaaatgttgaaataattgttctatcaaataattttgaaataacccttcataattaggatgaaaatgtcttacctaaatatatgtctttaactttgaaatttatagtatgtgttgtttgaaaatgagaaaaaagacagactagctttcaataatgaaagtctaaataatttagatcatttctactaccgaagacaactagacaaaaaatacatatatttatatattataaacatataatattatatattatgcgtatatatatatatatatatatatatatatatatatatatatacacacatatacatatggagagagagagagagactgtttaaaggcatcagtgagctaataagatactgaagaactgtaaagctgagctctgggaggcaatgaatctccagatatgtgagcccagaatttgaagctctttttaccttagggcatttgctgattctacagaaggtgtctggagctccattgctgaaaaaggcaatgaccccgataaactctctgttttggggttgaaaccccaaagatacgtaacctagcaggaagaatgaacgagcagtagattggcggtggactgcttcccagcttcaaatcatctcaatcctcacattaggttaagaccagtccagattgctagtcccctcaggcatctaagaaaagcaaatgtaaaatatttactaggagtgaaaaagagtgttacaggcttcaaatcatttatataaataatttgcaaaatataatgtccagcacacacataaaaaataccccaaaaaatgagggaaaaaaggtaacatgaaaaacaaaacaataaggcaagagaagttcatatgagctgaaaatattagttatgaacacaaagtattagataaatatgttgagtatgtataaggagataaagataagattggaaattttagccgagaactagaagttcaaaaccaattttacaatgaaagagtctagaagtaaatgatgctataactgaaattaagaattcaatgaatgaatttatgactgaacatcatattagacacagccgaaagaagatttgtgaactagaagttaggtcagaatatatccaaaattacagatagtaggggaagaaaggaaggcacacactgaagaaagaggaaaagatattaaggatcttatgataaagtctatcacaagtacagttggagtcccagaaaggaaggagagagacaattgggcagaagcaatagttgaagaaatgtggtgagaaatttcccacactgatgaaggacatcatgttccaaaagccctttgaactctaagcagaataaatataaataaataaataaatccacaaccaggcccatcatagtaaataaataaataatagaaataaatataaatattataaataatataaataaatccacaacatgacccatcatagtaaaattcctgaaaaccaaagataaacaaaacatctaaaaagctatcttcaagcacttggactgagagctgacttttcaatatgtataatgaaaataagaagataatacaacaaaatagctgtgaaccaagaattctaaacccagggggaaaagtatgtttcaagaattcaaggttaattaaggacattttagaccaaaaagaaaggcacagttcatcaccagagaattctggtgttctgcaagtagaaagctattaatcccagatagaaggccaaagataaaggaaggaattaagggcaaggtaaatggtagttactggataagtctagataaatattgatggtataaatcaatactgacaatgatgtcttgtggagttaagatatgcataacattaaaatataccacaataatggcatttattggaatgaggtaaattaattttaagtgttctaatgtttttccattaagatgaagagtaaaagtaccaattagtgttgaaactttgtaagtctcagtggcccctgagagtcaggaaatgaggtgagccctgtgattgcccagctggctgcctggagagtttccaggctgtggtacagagaggaggaacccagggagagcccagcaaactctccacgttgaggagacagaggtgagagtcctgggaggccaaggtagctaacgtttgcaaggtagcattctacagagaagagagctccacaaacggaatgctcagaggtctacagaaggaactcctcagtcttcaactgggtaggaacactagaaaagatctgagagagtgataactggagcttacatagggctagaagaagtgcctgttcccaccagcaagactggaaagcctcaacattcataaagaactctgaaggtttttgccttagtagcagagcaaaacaggcaatagactaaatgctcctcatgtcctccccagtagagcttaaaagtgagacttgaaaggatcagaatatttctgagtaacttaactgcattttagaatgaagctcaaaaatatttataaaaattataaatatatctcatacccaacaaagtaaaatcaacaaaattaccaggcatgcaaagaattattgcaagacaactctccatgcatctttcatatttctgcatgttttgtgagcagaggcactgcttgtatctttgaaaaggatcatgtttctcttcaaattaaagagcatacatacttattgtgcattttaaaaggttcagagaatcttgagattctctgatatggtttggctgtgtccccacccaaatctcatcttgaattgtagctcccataatccccacgtgttgtgggagggaccctgtaggaggtaattgaatcacaggggtgggcgttcccatgctgttctcatgatagtgaagaagtctcatgagatctgatcgttttataaaggggagtttccctgcacacactctcttgcctgccaccatgtaagacatgcggttgcacctcccttgccttctgctgtgattatgaggcctccctagccatgtggaactgtgagtccattaaacctctttttctttataaattacctagtcttgggtatttcttcatagcagcatgaaaatagactaatacattctctaagttcaagattcctcctctatgatatcacccactgagtgtgcaggaatcagctggtccacctatggcaccatgtgggaatcaggactcagagaacagacactaatactctggttactgtgatttctctgaataataaactgtcctttatctttgacccagaagtctttgtcttctgtcagcatccatggaactgtggctcaagcagggtaaaatctcagagtcttcatagttcttgacaggaagcaggaaagtatgatgcacaggaaaagaaaagttgataaatggaactcaacccataaatgatgcagatgatagaattaatatgaaagggcatgttaaaagttgttataactctgttccacatatttacaaaattaaaattaggactgaccatgttaattcgagacaaagaagttatagaaagacccaaattgaatttcaaggaattcaaaacacagtgcctgaattaaaaattatacttgatgagaacagtggcagattagatactatagaagaaaagattaatgaacttgaagatgaagcaatagaagctatccaaatgaaaacagaataagtgactgaggggaaaaaaaaagagcatccatgagctatgagacatcttgaagggtggttctaattacaatataaatgaatgtgaatctctgagggtgaatgtgggagaaagggacagaaaaaatatttgaagtaaaagtgattaaaatgtttcaatgtgatgaaattatcaacccacatatgcaagaagttctatgaccccaaagcataagaaacataatgaaaattacacctaagtacatcataatcaatttattcaacaccagcaataaagagaaaaatcacaaaaacaagcagaggaaaatgacaagttacatatagaagacaaagataaagataaatcaggccaggcacagtggcttacgccagtaatcccagcactttggaaggctgagttgggcagatcacttgaggtcaggagttcgagaccagcctggccaacatggtgaaaccccatctctactaaaaatacaaaaattagcaaggcacggtggtgggcacctgtaatcccagctacttgggaggctgagtcaggagaatcacttgaatccaggaggcagaggttgcaatgagcctcctgagctgagacagcaccattgcactccagcctgagtgacagagcaagactctgtcaaaaaagaaaaaaaaaagataaataaaaggtcccaatggaaactagaaactacaatgacatgcaaaaacatgatgaatctcacaaatgtaatattagagaaggtatgaaagcatatattatttattatataatctcatatatcaagttcaaaaagcaggaaaaaaattaacatttagaaaggcttgtttaggtgataaaatgataaagaagacctaggtactgatcactgtgacagtcagggttttgattaaactttggtgattggagaggagatactgccgggagggggccatgagagggctgcctggctggatggttatcataaaaatatatagtttctgtatttgcatttggttatttaattgatatctctatattttgtctgtgtttctatatatttgtcgcaattttataaaattgtctaaaagaggaagaaagaaaaagaggaaatgaggaagggaatgaagaaaggaggaaagaaaagaagcatcagtggcagaggttgtaaaactagattatagctagaagaaggaagagttgcacattagcctgactccataaataccactcaaaaactaaaaatcccagtgttatggattctgacaatatgttacctttcagaatatctctgaaaaattgtacaataatcacaaatagaattaaataataataaaattaaaagaagataccttactttctaaatttcccaaagagatcacatgacagtatactcagcaatgcaaataataacaataactagcagtgtaacaaaagcctcatgtatcaaataagatgacagaaacacaagcaaatgcttataacagtaagtgtaattaggttactttaataagtgtaaaagccactcagattgacttaaactcaataaaaaggtaaagctttaaaagtataaagttagaaaaatgtatatttgagaaaggagcatcaaaagaaaacatgaagaactacttctatttgaaccaatctattcggttagaagtctagcaaaaaaatctccagtgacaaagagttggttatttgatattgataacaatttaaattcctgatgaaatataatagtgatggggctttttgtgtcagatgatatggcaagatacaatacaaataaaaacctgttgaaaatgcaatgaggagttcccagatacaatattattagtcaatgacagaacaaatagactacggatgacatggactgtttgaaaaatgtacttagcagggtagtccttgctataggaatagacaggctgatcaatgaaacagatgaaagagttcagaaacagacccaagtagatctgggatttcagtacatattctggccgacatttcaaagacagatgactcaatcaatggcattaaaacaactagttggccatttgggaaaataaactgaatcccaacctcattcctttcaccaacataaattccagaaggagcagagatgaaacatagaaatgaaactataaaaatactagagtaaaagaaccaaaggttattattcagcactaaaaagaaatgagctatcaaaccatgaaaagacatgtaggaaacttaaatgcatattactaagtgcaaaaagccaatgtgaaaaggctacatattgtatgaatccaattatatgacattctggaaaggcaaaaccatggacacaatgaaaagatcagtggtggccaggagttgtgggggtggggagggatgaataggaggagtacagaggatctttagggcattgaaaatactctgtataatgcagtaatggtagatacatttcattatacattgccaaaacccatagaatgtacagttccaagagtgaaccttaatggaagttatagacttcagtaggagttacatgggatatctctgtaccatcctctcaattttgctgtaaacctaaaaccactctacaaaaatagtatttttaaaaaacaacaaaataaaacaattacaggctgtttttttaactgtgagcacatacttgcagacacaggatggtatgcatatgttatgaaatgcaggcatacacatatctgtaatgtgtgtgcatatgtcagtatattgcataaaagaggaaaataacaaaattgtaatagataaatgttgacataatgagtaaaggttatagtgaaattaaaaatgaaaactagtgggaaaatattctcacccaaatgacaacaaaagagctaatttttttatttgaaaaaaaagtgtgtgtgaaccagtaagaaaaaacataaacaatctaagagcaaaacggacaaaagactccattataattcacaaaagaagatatacagtcattataaatatgaagagatgccctatctctttattatataaataaatgcaaataaaatagtatcttctctttttgaactagataagattaagtggagttgaaagtacacaaaattagtggaaatagggtttccaaacacgctcgcataatattcgtgggagactgaaaggcataacctcctcatcagcaattttgggaaaacctaataaaaggtagaatgttcatactttgatggaaaaattatgcctcagagatttatcctaaactaacacccacccagagtatggagatatttatttactgaaatgttcattgcaatatgatgtttaatggcaaaaaaaaagtgtaaacacctgaaagctcacccataacgtggaatattatgtatcttttaaaaacaagatttccaaattaattgtaatgacagaggatgatgcttactaaaatatgaaataaaaaagcaggactcaaagtgtaaatatgttttgatcccaggatatatttacatatttttgcatatgtctgcatctgtgtgtgtatacacacatacaagagaaatatgacaactcacaatattaaaactggctatcccttagttataaaattatccacaattctcaatgcttatatgcatttttagcgtatccataaggaaattgcatttcttttgtaactacaaggcaaaaaataatttttaaaaataacttacaataggaaagtaagttttattggctctaagagaaaaccaaggatgtctagaagataatcaaattcacactaatctaggcttaacttttgttcttaatctgggatatttttagaaatttttataaaagtacagttttgaatattagcagcaatcaactttcaagtttaacaaaaagacacaatttacatgatttcttcaacacaagcatcaaagaaacagtctttgttcttaagaaaacttgagcatctaataatctgcaagcaataaaattatattgttgttgctattgttcagaaacagtccatttacaaagtgagttcaggtttatcccctagaaatgcttcattctagactgatgtccccagaccaatttttatgcaaattaattaaagctaaagcattagcttgagccaaacttaattaccaaggctccaagaaacaatcatgtgatctatttctaaagaaaagcgaatggatttttggattatctgttctaatggtcccctcccataagtatggctgattgagttcactgtatgaaaaatatatacataaactgtggaattctttgtgttcttttgtttcctcagccaggagggattagggcagaggacagtggggagaattcaactagtccgaatgtgaagagggaaacataaagcttgcccccatggggccaagaaagcaggatggaatgtgaaaggtctgcatgcactgaggagaaaggcagatgggctggaagccctgggaggagtcattaacacacagcaggcctgggtgcggtgcaaggcagtcaggcataccttgtctttgtgcaatacgccaaagcctgcctcgttttcaaagctggacaccttgttttgtttcttcccccatttttaattaactttatttaagaaaaatgagaaaaaaaattctatttcaagaaaagattgtcaaaatatgtaaagcacacaggtgaaacagatcaagagtagagacaggtttagagggcaaggaagagaaatattccaagagatatttgaaatagcactttatcctcaaagtgaagggtcaagccttacaagtcacagaaactccctggtgttcatcaacagactcaggttgccacctcaagcaggcccaccttttcagcagtgccccaggctctattaaatggggacctgctcattcttgattgaattcctctgaaaatttatcaagtggagcactgggaccaggggacacacaggaatacagattttggccttttcccctctctggatgctctactctttcccttcatgatatagacgaagccagatcacaaatagtacgttaaaggtccttgcaatgacctggtgcgatgattaggttcaatggccagttccctatagcaacagtgatagagaatgaagctcactcagtaaacaaacagtgaaggttccctctcagtatcatccacccaataaacaaacgtcaatgtgactggaaacttcatctgaagacatagctatgaacctaggagattatctcgttccacagccttttttcttttcaatagatgatgaaattaaaggtcaaagaggttgtgatttgcctaaaacatccagttatctttattcccattccagggttctctgcaacaaatataatgtgtggagtgcttagtagcatacaagactttaccttgttgttaaaggatgcaagagaaagtaagttatagtccttaataactatttacagaccttgatgagtactctaatacaggtccaattaaatagacattgattgatgacttcttattaaatgggtgctgggcaggaaaatatgaataaaacaaaatttctctcttaatctggtaagagagacaaagacagacacaactacatcacggtgtgatcaggatctggatggtaattaggaaaattcatgtgtatatatctaaagagtcataaagatatacacttaaggtttgtacattttactatatgcaagtagatctcaattttaaaagctaaaaagcaaaataaagacatttccaggcaaaacaaaaagaaaagagggattgtagtcaggtagagctggttatgattcttgaaagcagaactgagatcacagcacttactttccagaggtaatgtgatgattagagattacgtgtgaagtatctagggacagtctggcatttttatgggatcaataatttgcagattcacttacatcttctaggccagtgcttctcaaggtttaacttgcatgcaaatcacatggacatcttgttatacaatgcaggctctgattctgtaggtctgtgatgaggcctgaaattctgcatttttgaaaagctcccaggtaattccagtgttgcttgtccatggaccatacttttgttagggacaagctgccccaggaccacccccctccccaaaaacaatgcagctgacccttactccgaatattctgcagctgcattcctggacccttatctaggcactacagcaaggtcgccagacttgcttacagccctccgggtggcatgggggaggtcatgagaaacgtggataaacctaagttacaccctcttgtaaattcctatattgtaagctggtcacgagatgatatgtggtaaagttaaccgacaaagaaccccagggtctctctccaccatataaacccctcattttgtaagttcagggctgcctccgctgactgtggtggagcagcccagcaggctaataaacttactcgcctgaccttgggtctctctctctctctctctctctctctctctctcgttctttctctcagctaaccttacaactttgagtggcaatggggaagaatgaggatgaatgggttttttcaaaagtggaaaggtcttgatcaagttcaaattttaaaaggcctttctgctatcaaatcacaaaatagaatataggagaagaaaatgaaagatccaagagacagatgatatatccctaaatgaggaaagaaggcaggagactagaaagtgggaaaaccgaaatattttgcagaaccataaagatggcatttcattaaacgtcaggagtgatggaagaaaataatcaaaaacagcttgaggtttttatattcaatgatcaaatagataaacatgctttagttttaattattttattggatccttttgattaaaattgagctcaggaggagtggatatcacacaaaaaacataatttttcccttatccaggtcatgctagcagagaatgaatcaaggggaagtagtatcatgggcagtttaaaaataattgtatcagagaggaaactgtaagatgaggggttatataagtcagctttgctgcagtaacaaataaccccaacagtttcactgggggctcaacaacaaaggctggttgtgtctctacttagcccgggttggctgtgttccacatgctttccattcaggatctagacgaaggaacatggtttattaggagcaaaagagctgcaggcaacatacaatggatcttaaggcttctgcttggttgcagtacacatgatgtctgttccagtgccatttctaaacaagtcacatgaacaggcctgtgtcaatgtggtgggaacatacacttgtcccacaagggctgctgcgtgtcacattgtcacagacagggaaatataatcctcttttaggacgaagtagagacaagttgaaaccataatgccaccacagggatggactcaggcaaagagtccaagctcctctgaatctgctttgcacctataaccaaccctagctctagaatgttttttaaaaaattccatagttaagtatcctcagcacaaaatctttcattagcccgaggcaaaatggccagatttcaatttcctctcttaatgagcacttaaatgttttaaatgctacaggggagggtaggaggagaagccaaggggtgtggaagaaaaaccattactagataatcaacctaaaagtaatcaagagttggctgaattctctcctgacctttgctgtatttagtatgtgtcctaagagaatggttgagctgtagcaggacgagccgcagacaaaacttctcagacaccaagttgtagaaggaagggctttattcagctgggagcatcgacaagctactgccttaaaatccgagctccccgaatgcacaatttctgtcccttttaagggctcacaacactaaagatttcacatgaaagggtcgtgattgatttgagcaagcagggggtacgtggcaggggctgcatgcaccggtggtcagagtgaaacagaacagggcagagagtttcacaatagtcttctatacaatgtctggaatctatgaataacatcggtttctaagttatgagttgatttttaactactgggtttaggccaggcaggcccaggcctggtttcgggcctggtgcagggctgcctgtctttgattttacttccttgtttttttcttaaaacaggtactgagtataaaacaatataaagcgatatgggagggtctctctcttccctcatttcccccttttgagactctcactttttcttagtgggagttctcactcttatttttgctacttattttttttgttcaatagattgatagtgattcatatagtacacttgtgctgaagcattttggtgaactaaggtagcgatgaagattttttatcatttaaagaagcacaggtagcaaacaagggagcagtaagcaggtttttattactattataactcctattataagagttttaagtcctcttagtgctgggaaccaccttctaaacatggctttagggttgaatctgtgctacacttgtacaggcacatgtgtcagttttgtcatatttttaactatgtctttaactacttgcctttgattatctatgtgtagacagtaattagtaaggttaaatttcttatagacttctcttttagctgctagcaagtacttgagagctaatccattttgatagatagcatttcttatctgagttttttgccgggccagaatagtaaaggcttgaccggttttattagtgatgatttctaaaacagcttgcaaccgtatgactctgttgagcaggtaaatgggggtccagtattcctatgagccatcttgtgtctaagtggcaggcctatagtattgtataattttgtttttagtgggccatttatcatctttttaattacttatggctatgcttcgttttccgcaggaagcatagacagggaatgcctaggagttcgcctgtttttatgggcagtaaaaagaaagatggtttaatggtgccaataacacaactacctgtccactggtcaggcagcttagcgtaggctctatgtctacatatccagtataacctggtagggtcaggctagtcctggtggaattctgggtgggcctagacagtctgcaaccttggaaatttactgaatagatctctttctgtgtaattggaactccaccatgtaactgttttttgcggtatcgttatacagtttttgctttagacaactaagtcatcttacagaatgagtgaattcttttcctgtttttgttgttgttgttgttgttgtttagctatgcaataattgagacttttagaacttagaaatgatcagggtgattcttttgggctgagaatccatcaggaactgggtctgtaggcactaattctcgggcttcttatggccattgatctcttattacagtttttctacaaacataacatgaagtgatatttagagactgggttacatgcccagctaattgcaaaaaacaaatttttagtctttcctggaatcttaggtactggcacatttagttcatcctagaaagtctgaaatactggttctggagagcgtctttgaacctcctttcttattaggctgtttatgctagggtctagtctttttctatcaatgcctaatgatacatattgtttttttaattttattttgggtctgaggggtttgtgatgactaattctaaagggttacagttctcactcgtgcaggaggggctgacttttcttttttgaagcctaacaggatctttttaatcttctgttcaagtagcctaaatgacacaagaccagtattgacacattttacataaatatgattcttgacagacatactttttttttttgctgtgtaattttttttccctcatcagagaaccgcatcttattctatgctgcttactatcaatagcagcacaagcgtcaaattttaaggttacatttttggggacctctctttcttctgttctagctattactttacttgtgtcacctagaaaaggactagtccttaatcttactttaaagactgtgatcatggggggttcagaggggtcatagcacacatcgggcaggtcacttcctggattacatactttgtgctgagtgttattgtacaaacaagttctttttggagttcctaggcatttataataactataaaataataggactgtagcaatcttttgtctcacttcagtgatttgatgtatatactgggaacagttctcagtctgaggaaggtcagttgaagtctttactgtacaagtctaaattttaaggaaaatgagtcctgcaatgagtttcttcatgcttcggccatgtgtggaccagtcagcttctgagtgtgactggagcggggcttgtcgtctttttcagagtcactttgcaggggtgggtgaagctgctcctatccacgtacagctcctagtctactgatgtttaagggtggtcttggaggttgggcctactagagtaaactgagtctaacacctctacacagtttatgttaaactgggctctctgataccaggagtaaggtggcggggttagggtgttgcaaacttcaatggttatgtagggatttttacagagcaagatttggtatctagttagtctagcattcattagctaatggtgtcctttggtatttattaaaatcaccacagcatggcaggactttatgtttaggttttgcctaagagttagcttatctgcttcttgtgctaacagggccgttgctaccagggcgcttggacgtgggggccatttggaaacctcgtctagttgttttgagagataggccactggccttggccagggccttacagtctgggttaaaacttcaactgccattttttctctttctgacatatagagtgtaaagagttttgtcaggtcaggtagcctcagggctggggccaacatgagtttttctttttaactcatgaaaagctcgttgctgttggttgtaatagatgtagtttatctaatctacatttttattgactgtcatctactaaaatattgacttaaatcctgtaactatttgatttcaagctttaaattgatctggtattccttgtggggctccaattgcatctaaatagatgtgagagttgaaagacctataaggggcttctctggctttacgatgtcttattttttgtttttcctctggttgatgaaatgccagggtgaaagggatagccaaatggactaaagcacaagtgccactctagttattcagcagagtgcccagtaaaggtccaccacaataccaccacacatctgcttggggatgaacaacggctgactgattgataagctcttgaaaattcttaagcttactgcatcccttcaggtctccaaggaatgctaagtctcctccttgctgtgagagacacaaagtgaacttagtgttgggagacagaagctggatggacctcaggtgctgatctgcagggactttgggatatagcagagagagcttggcatgatttattactccaggctgtagaatctcagaaaagagctaccacgcagcctacgcctggtcgactggaggaccaccttagtggaagggggacaattagggcctctggcctgccatgtgcacaatcataacaattgcttttgtttaatgtgcagatggaatatttgatccatttcaaccaggcatttgcattcttggtatgctgtcttaattgccaaagtttgttttaagtctttaacttctatgatcctttagtaaaatgaatgtttcctttaacacctatttttattagtttttagactaaagaaagctaaatactattttatatttaataatgtttcttgtatgatttttatagtagataagttaaattttacttttatattagtgtgttattaatgttaaacttaattttaataaaaccttgtagacatatttatctaattttttatgtttgaccataaggtaagattttatagactttttttaactttttataatttttgttaaagagcaggttgatgctttaagaaaaacctgttgcatttttactttaatgtccagttcacagaaaaactgggtgatatctttttaactttagctaatatgtttacacacagaattttctttacaattaacgttttaaaacttgcttaaatttttaaaacaataatttttttaacttttaatgtaggtaaaaatccacatttttatgtccctttataatttttttactaaaggtatattttacttttcttatacaccttgcacataaactgtttctttaatggtactcaggaggccttattacttttaaattatacaacattttttgcataaatttttttataacattttttctttcacgacttttgcagacaatttttcaacatgtcttaactttttgacttattacatttttttctttaaacaactagttaatttatttcaggacaagaatttactatataacactctttttacataaattttgcctcccccccccgcccttctcttttttaaagcgaactttctttatgtctttggactagactgtctaaggccacaagattagaagttactataatacatgttacactgttaacttttagcaaacttcacttttgttgaaaaccttgtaagtttgggatttcaattatcctttgctattaataagatcttgtttagtctgaattaacttagaattggtatagatggcctctttttctctctgctggtctttccttgcctctgccagccacttatgctgctgttctcttaactgctgttggggggaagggggtctaaaactagctgtaactgtctatgtacggaaactggcctgggtgccttggcttacaggttaccttgtgccatacttttgaaacaagggacctgtccaggcttccttctgatggccaacctacctctaatgctggccagtctatttcacacaaagttctaagttttcctggtgtcacagtaacaccgtaatctcctttaaattctttcttgaaattttttaacatagttcctagtagggtgggcttacttacaccggacctgtttttgtttttgttttttctcctgagacaaaataccatgctcacaccacacacactcaccacaagacaaagaacgggtatggagggcacacacacacttttaccatttatagtaagccaaaatcacgaaattcaaaatccgagttccaaaagattcaagacaagtcaaaaccaaaaccaaagtatctagcaattcaagtcaagtcaaaaccagaacaaaagtgccaatgcaggcacactgtgggtgatcaggccactcttccactcagatggagtggggcaagttccaaagactagtcttaccaagtttcagatgtccggactccaagtgccagttccttcccagtgttcagccactgtgttaatcctccacgggggcctgctatgcgctgctctggcaaggcgttccactggggcaatttcctacccgggagtgctctttggatcctgtcactcaggctggccggagtcccccgcaggatgctccacagggcaggcctaagccgcctaaggggctgcctcggctgtccatcagttacctcgtttccccgtcagggaaccaagaaacgtagcaggattagccgcagacaaaacttctcagacaccgagttgtagaaggaagggctttattcagctgggagcatcggcaagctactgccttaaaatccgagctccccaaatgcacaatttctgtcccttttaagggctcacagcactaaagatttcacatgaaagggtcgtgattgatttgagcaagcagggggtacgtgacaggggctgcatgcgccggtggtcagagtgaaacagaacagggcagagagtttcacaatagtcttctatacaatgtctggaatctatgaataacatcggtttctaagttatgagttgatttttaactactgggtttaggccaggcaggcccaggcctggtttcggggctggtgccgggctgcctgtctttggttttacttccttgtttttctctcaaaacaggtaccgagtataaaacaatataaagcgatacgggagggtctctctcttccctcagagctgttatccccccagttcccttgtgcccacattactcaagttttttatgctctgttgatggaaaaatgaaagtgcaagtagtgttttcattttctaggaatcctcactatgggaaatatttgtatcttaaaaggaaattaaatgtagttaacccatacagcccagaaattattgtaaaatttgaaaatttccaggttgtgtcctctatccatatcctgtgcattcataagctaagtaagtatgccaattttgcatcagtttccaaaaaaaagatttttttcctaaattatcaggatatttctcagaaaataattgatataaatctgatgattagaaaaattgtatctttgccctttggtttcaaaactgttctctatctctccatgcatgattaaagcacggtttctgaaggtcaggaataaagctacggtcatgcatatcacatttcttttatttttcaatcactgttttgaacaggacaagagaatgattcaacgaagaatgaaataaaaattgaaacagaatcgcagagctcatatatggaaacagaaggtactgaaaccaaaatatattgttatcagagaatgagatgaaactgtgaatcatgacttctatatatacctgtgtgtgtgcgtggtgtgtgtgtgtgttttaggcaatgattactggaggatagcaatagtgttcaacttggtgtacctattgaaacttgaagggggaaaaaagaactctaactttctataccatagtcacagtattctctcaatgattccaactaaaacaaccctgagtgtccatctgtctcattctatttagaactttcatcaaaccaagaagatgccgtgattgtggagcaaccagaagtgattccattaacagaggaccaagaagaaaaagaaggtgaaaaaggtaggactgctcttaaattaacccatcaagaatggagagtttctttggattcctgcctagaattcaaccatcaaagttattctcatgcaattacagtttgtaaagggggaaaacgaacatttccttaaccccaaatctccgtttgaaagtagagtaaaatctagaagtagcaaaagaaaatactcggaagacttatagcaattacatatagcataaagatgtttttgttattcatttagattcaatttaaatttttaaaattacagtattgagaaagcctataagaaatcaaaactatggactagagggataaagttcatacaaaatctgaaatggctttagagcaaatagactggcctttttgtattgatttcatctgtcttccttagtatagtagtgatgaaagaaacaatttatgtaaaatatgcatgttatatgaacctaaattgcaatcttgcttgctaatattaggatgcaatcatattgaatactgttttaaaaaaagtgagcattataatgatttctgaaaactcaagaggaatgaacactccttaaatattaaagcagcatttggggcaaaaagccaatgtattggagtgaagatagaaatatttttaaaaatgtgtttaaaaaaactattctggttaatttagtgttaactgaagaacttaaagaattcaatttttaaatataaagcaatctcttaaaagaagctaataaaataatttttgttacagtatatcataaatcatactgctcttaaataaatatgtatttgcaaagcagttgcagagtaataacttgacaggccttgtttatagaacacagtgatcaattttgtttccaaattaaaactcagacatgatctcaattgtaaaatcaggtcaatagcaactacagcttccaaattatgaactcttcttggcaggggcattgacagtttaattgctaaaccatgttagagattttgacacttttaaaatgttgactgcatttacagtacaatattcttccatgtctatgcctctaataagcttttcgctattgcaaatcctagttcagactcacgactccactttcctgttaagtcaaataaagggtatattcaaagttatttcatgtctaatattgataactgagaattgaaacaacccttactcagaatcagatatatggtattgctctcctcaattgtagtttaaaaatgtgaaatagacaatgctgtgcgtgttagcttaatttctctgtagcagaaattgttggctctgtttattgcatttcaagaaatgcaaatggtaaagaggaaaatcaaacagctgtacgttttcctcttttgacttgacctataagaaaaaagctggcattcggcacattgacatgtttcccttctcccagagccttcccaagcattgaacactactctgatgactgaagaattaaatatccacctttcctctcttccttgtaaatatgccaatctttttctgataatggtggaatagcatgtgggaaaaaagcaaggtgaaattctgctacttgcttttagcaacgatgaggttgaatttctttattaaaatttgacttttcactgtaagatgactaatgctggtagtcttgaattaaccacattttctcttcccatctttatcatagatatttcacttggtcctgccttgaatatttctggtgtttaaatttgaaataattttaagtgcatcacatttgtcatcttatactttgcatccaagtgaaaagtactcataggaaaaggaggcaatgtagattcatggtgctctgcagtagctctgctccaccattgacaagctgggtgactttggacaagttacttaacctatctgcttcaggttcttcatctgtaagatgatgatggcaaaagtacctgtcacatatagttatggtgcaaatttaataagtaaaacgtgcaaagcaattaaaacaatgcatgacacatagaatgcactccataagtatttagtatttatcataatttgatacattgatgacaaagtcaagaaaatccacatgtgatttccccaagtccatttatcattcttcttcactattttgaatctgtagaaagtcacatattttacattatccttcaacaacaacaactggttctatccatttggttggcagcaccatctcaggccagcagttttgatatggtctaaactctttacattgctgcgtattttattctaaagagataaaacaactaatagaaggaagccaggtggaaggcatttctctccattcataaacacttccttgtttgtcagtatctcaatcttccatttgagaaataaacacaaccataacttctatttttttaaaaaagaaaccattgagctgttgatagatccacaaaagaaaactagtaaataaattcaaagtagcaattttttttactttctttttatttagttattaaaaagtcttgtttgaaaacatttcgaggctatagctccagattttgtattcacaaaatagtgtcttaatggaaagttgtacatatgtattaggaattatctgtaaacaaaacaaatgagtattttattacatttgtaaagatattctttatagctttagaagtattccttctcttttattttaagactccttttaaggaggcagaaagtgattcctttaaaaaaaaaaaaatccagaccaggaaaaatatataacctttttctctcttttttgtagcattttataagattagaaaatgtagataatcttcaggatacatcttctatggctcccaggtatatgggcacagatgttgcaacattaagttttgaagttagttctattaaaatatggattttgaaaagaaggaaaaatattcagcagaagttcatgctgataaaattacacaatagcacagtggacatgtccctgggagacctgaaatacaaaaatttcaacaggcagaaagtgaggtttcacatatggcagcttttctgatatagccacgttgcctcttcctaaatgagcccagttttatgatttcccagcaggacctgcaacacatatgaaatccagtcgaataacgtcatttaggttaataaccaaataggaaagtaatattatagaagatctcctctgaaaaggatctcatgttttagtataaaatataaagtcagcattaaaacatctttcttacatttgttatttgggcaaatttagaaatatttgacataaaatcttaactatatcaacatcgagttattatttcacaaaattttcatatatgttttattatgatatatattggatatttttttctctaagtgttaaacagaatgaatacatttggtcccaataatttttcatatcaattaataagtgtagtgtggaatagtaatcctttgtctgtttacctaagattgagcaaaatgttgacagagacttaaagtatactatggtttaatgttttcttagaaaaagatgcatatgggcaggcatgcaagtaaagagttaagtgcaagccagtgacaagtgtaaagtatcatgcccttaggttcatgttttgaaccaagcatggtctgaccagcatgaccttgagacatagtgtacagacagccatggcttctagccctgcctgtgtgattcctggcaatccttaaacttcgaagaatcccagtctctagggtaataatgaggggcatgaactcaaaattgcaattataaggttctccagttttataaattttcttagaaggccaactctgaagaaccacattcttggtgaaacaagagcgatggcatgggagccaatggtcagccatgctgaaagctgaaatcataggttttcctcagttttagttattgtaccctattgataaaaatatagaggtgccctaggccaggcaaaaaaaaatcagccaaatatattaggacttaccaatgattggacagctaattattccctaaagatactttaaagggggaggggaatgccttttagctcaaggtgggtttacacagaaactctgctcagaaccaagctggatttccatcaccatctttcttagtccatgtgggaaacatctttttttgcaactcctctggctacgatttcatcttttagtgaacacatagcaagtgagggactttctcttctgcttctaccaatcaaatccattagaggtttatctcatctacaaagcacccctgtatagcccttggtgttttccatttctcataggattcttacatcactggcagagccctttcttctctccttgaaaagcagagcttgcactagcagtgttgccatacacagaatacctgtgtattacacaatagcacagtggacatgtccctgggaatagaatacctaacacttgggccatcatatacagactgtgttcttggctataaagaatcattgctcaggcatatttttgattcatgcaaaatactatatacacttgcatgttgagtaacaaacttactggaacattctaccttcagaaagtctttgtatctcttttcaaatgaagtcaagtttagtaatactatattattcatattagcagcacaatcatttagttttctagggcagttttaccatttgttttcttcttttttaataatattttgaatctgaaattcaacaaccaaaattatgttttaggatatcagttaaattaaaaatgctggtctctgtttgggttttatgaatattttagtatctaatgaaattcctcatattggttaagtaccttgaacataaaaattataaagttttaagctaaattgtttaggttttctacatgtctctatgtatgcaatgtaaacatatagaaccagttcattcaaattatgctgcataactgacctataattttaaagttaaaaaacatagaagaataaaaggtatattcactgcactttgtcttgcactttgatttcttgctacaataatgatgttggtgtggatagcatatatgcatgtgtatatgcgtaaagttagattatacgtgtataaagttcacatgtatctacccagtaagaaagttatgcaggcctcttgagtttgttcaaatcctctagcttgctgcaatcatcttgtctttaaagatttagaaaaaaattgccctgaaactccatttttcatgttaggagaaatctatcattccttccaatatctctgagaattctttggtgtcaggtttatttcttctaatctcaggctccaagctcctgcctctggttctcacttcagcctttgccattccttttttcgtaagctgtctctagttctcactatggctcccactcagacaccaccaccacctctcatcccttcactccgtgcagtaccacaaactcaaggatgtgtgtaggtttaagtgaatgttagggtcaatacttgtaattaacttgtgcttgcccatctggggaattttaagagaccatctcttctaagtctccagcatccggctacatcctgtatcgccctttgtcttctttgatttcttgcacttcctaacactccagtttcatttacagtttaactttgtatcatgcctgtgtccttctggtcttgccctgaggtgtatgattctacaaccatgtggcttatcaaaccacgtggtttatcaaaataatttgcagaaacaaaagatgactcacataagtggaattctgtctttaaatattgagctttttactcctctctgccgaattagagttctacaactcaactctctgtgcataaagtacctgaatttttttcacaactaataaaaagattaatgtgtaccttcatctaaacataatattgttttacatatatgatcctgaaatacttcagaaaattaaccttctctaaagatagtgagtataattattaacatttgttccttatatttaacttccttccaaagacattatataatgctaaattgaaattttcagaaagataaaattatggctgtcatacaactataaaatcaatacaagtaaaatattttatttaaatgattaactagtaagggaatcattaagatgttaaaactggttcaaaggagaatttgaagagtgtgtgtgtgtgtgtgtgtgtgtgtgtgtgtgtgtataaaatccatctatcatctatacagtgacattttagtcaacaacagatcgtatatgtcccggtggtcccataagattatgatgctacatttttactgtaccttttctatgtttagttatgttttgacatacaaatacttaccattgtattataattatctacagtcttcagcacagtaacatgctgtatgggtttataacctaagagcaatagactacaccatataaccttggtatgtagtaggctataccatcgaggtttgtgtaagtacactctatgatgtttgcatcatgaaatcacctagcaacatatttctcagaatgtatcttcaccttaagcaatacatcactgtatattgattaggaattatggctatatggatatacacatggatccataatacacacacattcagaaacactgaatatatccatacaatcacacacaattcaggagcactgaaaatttccaaactggctaatatcatacaggacaatacaacatatcctttccttctatcagacaaaattcgttttcactgatatgaacaaatctcattttcattactacaagttttctacatgttaccttctacctgtacagatgtgtaaaatagtctagtgaatagaaagctggtcaaaggaatacaccctcatagaaccagataatcccacagagggattatctggagggtgacacccaaccttccaccccagtgacacccagggatctcttttatccattgtcaagtcttagacaatttttcttgacagtatactgaaggcaaaactgccctttttttaacctgtttaccacctcacttatttgttattgttcactatttgatacatttgatagacagtgataaaatactagggtagtatcagagtagggcagtagcttccaacttcatctgaggttgtagtttacttgctattgttttatggcaagtactgctattctacattttatatagttgtacacacactgtagatgaagttgtacttctaagatgcctcagttgtgagatgtgccattattttacatattattaataaattttctaaaatctggcttattaaagtaagacacaataattttgtatcatttaggatttttattttatgtgtttaaaaaaactcttcgaacaagatgtagaacgttttcatatatcactcttgagaatacataaaaagaaaatgttaggctaaaggaattagttatgatactgctaaaacttcatcaggttcagggtcctacttctaaatcactttcagtcaaagtcatcaatatctgtttttattacacaatattgtcctctgccaatgtctttgatggttcagaacttaagagaattcataaagaatttaaaactcattggcttgtaagtctcttaagacttaagtctgtcttgctatcatatagagagttagcctattttttcttttttgcttctacttagaggcagttaaaacactcctgactcaccacctccctccatatttattatttttcagagattttcacctaagtcattgaaactcattctgcaagtttgagtacttttggttttgatgctaatgcatatatgggtatgataaattgtatcatcgtgtcctgaccaacaaaaattttgtaacaattcactgtttcaaagatgttaagatgtgaaagcagtgtactttatattaggaaatatagtattatttatttcacagtgaaaactactacactgagactagaaaatggaaacttgattacaagtgatataattgagtatatttgatatactcaattgatatataattgagttattttttttctactaactctaatgactagcagtgggatccttactagcacatcagtgcaccctactgcacattgtataactaagaaagtcataaatggttttattcatacattccacaaatgcttttaatgcacatgtaatatgtgccagaaattatatagacactatcactgaaactgaggaaaacagacaaagccactgctgggctcatcccaagcatagagctcaggatgtaagtctttttttttttttaactttttattttattattattattttttttggagatggagtctcgctctgtcacccaggctggagtgcagtggcgcgatctgggctcactgcaagctccgcctcccaggttcacgccattctcctgcctcagcctcctgagtagctgggactacaggcgcccgccaccgtgcccggctaatttttttgtatttttagtagagacagggtttcaccgtgttagccaggatggtctcgatctcctgacctcatgatctgcctgcctcggcctcccaaagtgctgggattacaggcatgagccactatgcccggccttttttttttttttttttttaactttttaagattcctcatataaatgagatcacacagtgtttgtctgtgtcttatttcactcagcataatgccctcaagtttcatccatgttgtcacaaatggcaggatttccttctttttatggctgagtaatattccattatacatatatattccattgtatacatattatgtatacaaatgtgaggtgtgtgtgtgtgtgtgtgtatgtgtgtgtcacatttttctctatttatgcatctatgggcacttaggttgtttctgtgtcctggatattatgaataatgctgcaatgaacacgagagtgcagacatcaagctactgatttctcttccttcagatatgtaaccagaagtgggatggctggatcatttggtaattctatttttaattttttgtggaatctcatactattttccataatgctgtactaatttacatttccattaacagtgtaaaaggttcccttttttccacaccctcaccaacacttgttagttctttcttgcctttttaatgaaactctccctaacaagtgtaaggtcatatctcattgtgattttgatttccaattccctgatgattagtaatgttcagcaccttatctcatatctattgcccatttataagtcttctttggaaaaatgtctactgaggtctcggtatcaacataatgctggccccataaaatgaatttggaagtcttcccttctcttcagtttttttgaaagagtttgagtaagattgtcattaattcttctttaaatgtttggtataattcaccagtgaattaacctggtcctgggcttttctttgttgagaggtttttgattactgactcaaactcttcattgatttttggtttaatcagattttcttttttaaatcaggtaatctgttttattataattcttatatgtttaggatactaaccccttatcatataaatggtttacaaatattttctcccattttatatgttgccttttcaccttgttgattatttccttttctgtttagaagctttttagtttaatgaatatctgtttatttatttttgcttttttcacttgtgcttttgatgtcatgtccaaaaaatcattaccaagaccaacattgagaagttttttcctatgtcttttatgtgagttttatggtttcaggtcttacatttaagtttttaatctatttcaagttaatttctgtgagtggtataagacagaagtataattttattcttttctatgtgggtatccagttttcccagcatcagttatgaaagagactatcctttcactgttgtgtgttcttgacatccttgtcaagtattaattgactttatatgcatgggtttatttccgggattctcaattctgttctattggtctgtgtgtctgttgttgtgccagtaccatactgttttgattactatagctttgaaatgtagtttgaaatcagtaagtgtgatgtctctggcttttttcctctttctcaagattgctttgactatttgggatattttgtgtttccatatgagtgttaggattgttttctttttttatgtgaaaaatgcccttgaaattgtgatagggattacgttgaatgtatagatcgatttaggtatttgggcattttaacaacattaattcttttgattcataagtatggaatatctttacatttatttgtgtcttattcaattttcccatcaatattttacagttttcagtgtacagatttttcactgccttggttatatatattcctaagtattttattatttctgatgctactataaatggatagttttctttatttgattttcagatattcattgctagtgtatagaaatgcacctgatttttctgttgatttcgaattcggcaagtttaatgaatttattagttttaacagttttttgttggtgtctgtaaggtttttaataagactatgtcatctataaacagagaaaatcataattcttcctttctgatttgaatggcttttatttctttttcttgcttaattgctttgtttaggacttctagttctatgttgcatagaagtggtgagtaggggcatctttgtcttgttcttgaccttagaggaaaagccttcagctttttaccattgagtatgatgacagctgtgggcttgtcatatatggcctttattatgttggagtacattcctcttacactcaaattgttgagtgttttttttcctaatcatgaaagaatggttaattttgtcagatgctttttctgcatatattcagatgatcataagattttcatccttcattttgttaatgtggtatatcagatttattgatttccatatgttgaaccatccttgaattccaggtgtaaatccctccatccttctaaactgctgttgaatttgctagtaatttgttgaaatgttttctatctattttcatcaagggtattggcctttaatttttatttcttgtagtgtttctatctagctttggtatcaaggtaatgctggcctcataaaatgaatttggaaatgttcccttctcttcaatttgtttggaagagtttaggtaaaattggcattaattcttctttaaatgtttggtagaattcaccaatgaagtaatctggttgtgggcttttctttattgggaggttttcgattactattttgatctctttactcattactagtctattcagatattctgtttcttcgtgattcagccatgttagattgtatgcttctagcaatttattcatttcttttatgttatcccatttgttggcatataattgttcatagcagtctcttatgaacccttgtatttctttggcatcacttgtgacatcactgtttcatttatagttttatttatttgagttctctcttttttttttttttttttgagacggagtcttgctctgtcccccaggctggagtgcagtggtgtgatcttggctcactgcaagctccgcctcctgggttcatgccattctcctgcctcagcctcccaagtggctgggactacaggcacccgccaccaagcctggctaattttttgtatttttagtacagatagggtttcaccgtgttagccaggatggtctcaacctcctgatctcgtgatctgcccgtctcggcctcccaaagtgctgggattacaggcatgagccaccacacccagctgagtcctcttttttctttagtcagctaaaagtttgtaaattttgttaattttttttaaaaacctcatttttgttcatcctttttattgtttttctattctctatttcattagagatcagagatttcatgagagattagagatttcagtcctaaatttttaccatttttttcttctactaatttgggctttatttcttttttagttccttaaagtgtaaagttaggctatttgatatctttttttcttaatgtaggcattcataactataaactttctttttagaactgcttttgctgcatcttgtaagttttgttatatggtgtttccatttttgtttgtctcaagattctttcaattttgtgatttcttttttgacctattggttgttcaggactgtgttatttaatttccatatatttgtgaattttccaaaattcttcctgttattgttttttagttttatatgtttgtgatgagaaaaaatacttgacatgatttcaatgaacttaagatttgctttatggcctaacatatgatctatcctagggaatgttctgtgtgcgcttgaaaagaatatgtattttgcagttattgaatggaatgttaggtgtctgttaggttcattcactctataatgttgttcaaatctgttgtttctttattgattttctttctgggtgacctatctatcattgaagtggagtattaaagtcccctactattattgtattgctatttatttctcctctcaattctattagtatttgctttatatatttagatgctctgatgtttggtggataaatacatacaattgtacatcttcttgataaattgattcctttattattacaatgaccttttctagtctcttgtgactattttttagttaaggtctattttgtctagtgtaagtatagccaccttgctctcttctggcagcccaagctgtcaataaaagctagaatggtggtgcagaattattaaagtagaagtgatagggtgaaaacccagggttagaatgagagcatgcatagcctttctggccatgccacggagtgtggagactcactgccaactagaatgcagacaaatgatttgattcatcattgattcctttgttttccacgtcattttacagactaaagtcagtaagaacccaaaattattacagttatcgcactctgtcagcctttggtattgaattcatatgggattatatgaaataaataaagttttcttagaacatgcaaaaaatctagaacatttactacctggccctttatagaaaaatactgctgagccccagtctatttatataaagcccaatgttaccctgaatgtgaactccctcatttcatacaataactctcaaattatgaatctttgtcaacacacacagacatatacgcatccacttgagatgtttccatggaaacatggatttattctcacaatgccatgcccttctgtaagcatagtctttgctgtgtttgcatccctccccaacctgatagattggaagaaaatggtgccctctgatgtcagcctcccttaaaggggccccaaggtagcatgtcttgggcctcaagtatttcaggccataagtggaatggagtaatccctacaaccctgtactcagaagcctattaccttactttgacttggctttatctggtcagtctcattttgtttggctctttctctcttagaataatagtttaagtttcctttaagtacagttttctgccactgtacgtagagttcataaagtaaagaaggttctacctactttcccgcgaactgatctttgccttctcttagtatactacaagtcagacttgcattatgactgtgaactaaagatcctaatcataaacattcagacagaaagaccatttcagtgacagaacaagtgcaagtctaatctataatgtatgtggagtagatagtgattgtaataatatggatgtttatgtatacattttttgtaaaaaccaaaatattgtcaacccaaaatttaatttgtacatttatacagtggttggaatagaggctcaacatttacataaaaggctttattttagtaaacgaatggccacaaactattatgtgataggttttggatgacatacttactgcatttggatttagactcaaccacttcacatcaggtgcaagaacttccagatcctactgattgtgcaaaagatatatccattttgatttggatttcaaatgtaagtgctgcttttctctctgcttcagaaggaaactcaatttcttttcattgctctttatacatcaggtgccttcatttcagcacagtatgtaaaaagcaggtggtataaggagtactttgaatgttaattatttttttcatcgatttcaccatgaggatttacctttcaatgtgtttttataatcaagatggaaacaattagggaacttgctgtttgaatgtttcactacatttattttatgacatctgctgcaatgattaagaaaaaagagaaaaagggaggcaagcatttgaacaatagcaaggggtttggattgattgtatgtgattgctttatttcattgtgaaacttcaaaggaaatgttgtcgagatgaatcagtcacgtttctaaccaataatatcatcccattgtttgaatttacattttttacatagaagcacatgagttcatttttcagagatgttgtcatagtttattagccttcattttaaattgaacctaattttataaactgcagagaaatggggaaaaagggaaaaatagatatttcttctgaaagaaaaatttcaaaggagaattttttttccatttgtcatatttggtttgttcctcaaactttaaacataatttacttcatctgttcttttgtttcatatacttacaaacatagttcataaagtaaaaatattcaggattaagaggttcatttttcgtaacgtattaagatatggtcatataatttcaatgtaagggagtacttttcaaaattaatatagtcaatattttacactttgttacattactcttatttttccattaacaaaatattataggaaaccttatgcaatgagaaactaaaacttgcgtaacatctagtaattagataggataaatactagacaagataaatatagttatataatataatgtgtcttatatatatatatatacatgtgtgtatatacataaatatgtatatttcatatctccaaagtctacctgtttaagagatactcaataagtagatctcaaagttatctctgacaatacaggaacatatccagaagatatcttactattttatcacctatagtaaggaataaaaattttagtccagtcaccaaataaaatgtggggttgaagagaacattaagggttactgtttttaattgcctggagtagacagaacaatggtcccccaaaggtgtcctcatcctaatcccaggaacctttccatgtgttacattacacaggaaaagagacgatgctgatgtaattaagttggggggcttgaaaagagaagaatgtcctggagtgtccaggtgagcccagtgtaatcacaagtatatctataagcaaatagggaagcaggagagtcagtgagagggaaggagatgcgttggtagaggcagaggagagaccacaagagagcgattgagatttgaacatgctatgctgctggctttgaagatggaggaaggaggcgatgaaacaaggaatacaggtggcctctagaaaccgtagtaggtaatcaaacagatttttccccagagcctcaagaaggaacatagctcagctgacaccttgacgctagcctcataagacccatttcagacatctggcctccagaactgtaagaaaatcagtttgcattgtgtgaagccactaagtaatttactgcagcaagtagaaactagtacattacctctaccgctactctagtatttcgcatccaaatttagaacactccttttgaaaatcctagactttcccactgtcttcttttgggtggtgatgaggcaaagatgattgacagatgggtaggcaaacagagtaccctccttctgagtctcctcagttgcactttcaatgatgtttattaatttaaaaactatccagcatgaatatgtacaaggcactgggctcggggctggggcacaaacaaaaacaaaatagaaaacccacccacccacccacacacacacacacacacacacacacacacacacacacaaacaatctctaccctcaaggggaagctaagccctcagtagtgaaaacagattcatctggatggaagttcttaaaatgtgttccttggaccagtagcttcagcatcatctaggaacttgctaaaagtgcaaattcctgagctccccttcgagtatatttcttatacaataattgctgtggtttggtttctctattagaatattaggactttatgaaagtttgaaccctgtgtgtgtgtgtgtgtgtgcatctcttgtgttatatgtaggaattcacatttatatatcctagagacaagacagtgaaaacaatagaaagcaaataagcagagtttggaggctcatggtccagacttcctggcaacaggctgcgtaacactgcttagtctgccagtaaccctagctccagcaggtgtagcccaaagtgagggcagaggctttccaagttgaatgtgcatgaaatcacctgaagcctttgttaaagcatggctttcagtgccctatccctcaagtttctggtttagtagatctggagatggcaggagtcaaaatgttgctttttcttttagagacagagtctcactctgtcgcccaggctggagtgcagtggcgtgatctcagctcactgcaaactccacctcccaggttcaagcgattctcctgcctcagcctcctgagtagctgggattacaggcaagcaccaccacgcccggctaatttttgtatttttagcagagacagggtttcaccatgttggccaggctggtctcaaacacctgacctcctggtctgcccgcctcggcctccaaaagtgctgggattacgggcttgagccaccgtgcccggccaaaattttgcatttttaatgagttcccaggtgatggtggtactgctggtccagggaccacagcttgagaaccactggcaaagccctcattatccaaaccagctggctcacaactgccactgtgggagaagatgcttctttagcgtcactgtggacccccagtacctgcagctgagacacagggcattacctgtggtaaggatgaggacctcttcccgactccaacccacagtatgtcggagatcagccacttataagcctctcttcccgcatatgccctctttgtggtcattgcacaacacatttctcccacagtggcaggtgatatggacaagggaacacagagaccgcgtgcctaggttagaagagtacagaaccaaggactgtgtttgtttattggaaagcagccctgtggtacgcaaaatgcatcctgagcagcatatattggagttgtgtatacaaaatcatgtatgctactaaagggtccttgttatgccagggccacgactactccaaatgtcatgctcggggtcaggttccagccccagctgaggtctgatgggagtgggtggatgggcagatggcaggtgaaaggtagttttatttagcagctctcttatcagcagctctctcacactagctctcttatactctctgcctttatctcggctgtttgctccggctctgcggcccctgtcagcagccaactcccacacacagccgcaggaccagcctgcaaggccagctctcccttacagtgttagcagcttaactctttctctctctgggcacgagtgcgagccatggctcccttctctccgtcttgcagtactctctctctttctcttggccccagcacaagagcgcctgtctggcatcagcggggcagttatactttttacagacagtagtgactcagagccaagtgtgaacttaaacagattatataaaaagtggagtatacacctgcaccctaaactcactaagtcatgctggcctggatgtccgccttggcctattcttgagcaaagcacatccatacaccttacagtcattctttccttattttgatgaacaggatatatggggggaaaatgaagataaaaattccccatcattttcatagttctacttgtctttagacatagaaacaagaaggagtcatgtgaaagaagatggcattctctctacaagggttgaaaaaagagcaaaaataggatcgggggcataactcttgctcaacttgcggaagttccccacacaaagtaaaaataaaccctgctttagcagcccttatctgatttaagtcagtttgtcttccaagatctaacatttcctccgttgaatttgaggggcttattttaataagaaaagaaaaaaggagaagctgaacagggcctttagagcaacacacataagctgtttgccatattgaatcaacacctggggcattgatctgaaagctaaacgcaggctgttcacctggattgccaagtataacagaagcaactggctcactgacatcagagagagcgtacttcaccagggctccatctgcaattgcctttgaggaccagagataatcagaaaaaaagtacagaggttgttctgaaacctaattccaacttaggagcatttatttctcctttccgtaaactacctgtgatttctaatcaaaaatgcttttctaaacccagctgacctaattctccttttctccctcacagcgtgtctttttgttgttgtcgatctttggcttcgcttattcaccaagcacagttgttgttgcctagctctctaagcttgtgtgtcctgcctttcccaacattccaaggagtaatggtctcattaacccagtaattaaagaaatcctgtacctttccactctggctagctgccctcttccttttcccctattgttctctcagtaacaccaccagcagatggtttgagattttcaccctttcaaaagctttatgtttttcccatctcatcaagcatatctcagccaagtgtaattagcttaaggcttttgaatccttaagggagatcagttaaagacttgagcaatttcaatgaagagcttgaaaagccaatcctggaaggctaagggtaaccacaggagagccactattatttagaagcaaagaccctctcctccgcccatccctccttctttaggcactttaaattctcagaatattcatgaggcctccagggctttgggactctatttggaccattattgagtaggtgggatatttaagctcttactcatcatcgggtcagttggttccttttaattgatttcaatcaaggggccatttttggggagccttaagttactctcaaatggccaacagtttgtttgctaagtctcttagccttttcattcctttctttatcctttggttgttggaaactagctttctttgtagttcaagcagttcatatgaagtctaaattaattaactgcaacacagatttgcaccctacctttgagtgatggtgaacccccttgattcctgaatagccacatgtattgtggtagttgatcccacagcccaagccctttttccccatacttgggaaaaagcaagttgttttgagaccaaattaaactctatttttattgaaatggagtggagtagtgcttaagtgtgtgaagcacagattgttggtgggatgttaagagaggggcccaggctctccctcgaattgggtgatgtgtattttccccatgctttcaagtgggaggctcggaggctcaggtgttgggtaataggatgattaagtgtgttctcatgtctagtttctcattaccaagacttgggtaaaaggagaattacttttgtaaatctactaccatctttttcaaataaaaggaaccaatgccaaaacatttgattagaacgacctctttttgtctcaagtacactaatcagcttctgtttgaacagtgatgcataggtatggagatgtgcctgtattaaatattatacatctactgtaccattagaggacactacaatcacaacttagaggaaaattccttgtaaaacatgggatgtgtgttctgagccgtggtatgacatggaattggcttgcaaagcagactccaaatacttatgaattaatttattgctgtctgaaaaatatgacataatgtttgaagtacaaattggcttacaaaaagatataagcagggtgaacatttttggtaggtaagacagaaatgtagctgcattttataaatgtttgttttgcataggagagtgataaattacagtagagtttcactattattgctttgaatacggtaggcctaaagaaactagactatcccagccaacgtggcagttctgaaccacagaaaccagttgcattggtgcagagtaggtaagacttagaagaaagaaactgctgacaacaccttcactttataacaacatacagtgaggcagaggactattagcaaacctgataccacagtgtccagaaaatgtgcagaggtcatcttctataaggtttcttatacaacagtttcaccacggccatggtgctatgggcaggaaagcttttgtttattccatttttcaaataactgatgcttaaaaaatttttaggcacagtcaaaataatatttaaaaattttttcaaaacagcggtatctacttttcttcaaactgaaattacaggaattaagggtatgaggagtaaaatatacctgaccagggtcacacattcagtaggtggagcaaggccctgacatttattatctaacttgtgacccagcatcctttccaccctacccttttcccctctgagctgctctgaggggctgtggctaacagagtatgacactcgagagggtatgtacctaattgtaacttacccaactttatataagttgggtatagatatataaaatcacccaactttatataagtttcacagttggaacctggaggtcaccttgttcaacctcctgctgtgatgcagaaagccttgatgatttccttcccagctgatgctgtggcctctgtcaagggacatgcacgatggggagctcactatctttcgcaggagttcttttatcctcaaagattgagtgtttataaatgaactggattttcctgacgtttctgctgactcatcccagctttgctctgcagagggaactgaaatgaacctggcctgtatggcaagagtctcctaagtctttgaaggcaaagccttcctatagcgccccctatactgtcttctggttagtcgtttatctcgcctattccaaacgtctctcacgttacatggtttccaaacctttcatcatttgactatgtacttctaagcaagtcagatttgccaacttctctctcaaaccgtggatatagattgcacacagtgatccataccttcatttgtctgattcaaagctaaagatttatttttaatagaaattgcttcagcccctggcaactcagtacatgaacttctccctgggtgaggtgaagaagtatcctggcagtgaggctaacagccagcccaattctgaagccagactacctcagtttgcagacaggttgttctctaatgagccatgaacaggtcatttaacttggtttccgcatctgtaaatggggatcataatagcacctacctcagcaggttgtttatagggatgatatgatttaacatgtgtaaagttctggcagtagtgccaggcatatagtaaactctcaatcaatattaattattgtggttatcattgttctgagtaaaaggctatactccaaaccaagggaaaacctctcatttgtttgtgatgaacggtgagaaacctaagaactacaggaacactggatgaaacgttacctcctgccatataattactttgctaatctcctcccttagtctagcacaatgtggaaccatgagagacattcaagttactttcatcctctaagtgcgcccaagctagaagtccagtagttttcctgttgctgccaacatctttgatcaaaagagacctcattgaagagatgcagctgatcaagaaaaattccctccaggctttggtgtctggcagatgtgctgtgtcatgagagtgcatctgtcagagctggctctgtccccatgaagaattgacagggccatgcaaacaaccccgaaatctggcaaaaatgaacctgctaacttagggaagaaaacacgaatggaggtggatcgatgtgcacccactgcctttattcctagtcaggtaccaaagagtaaatgttgcagcatgtaccataggacagtgacagtcacagttgacatttgtatagaagcctgacaaaacagggacacaggagcatggaaacagctacccctacccctcagcttaaggatttaaagtttcgagatttatcattaattttatccccttactcatgttccctgtcttggggttttctttttactagaacttcttccagttgtttctgctgagatcaaagcataagaggggccaggcacggtggctcatgcctgtaatcccagcacttcgggaggccgaggcgggcagatcacctgaggtcaggagttcgagaccaacatggccaacatgttgaaaccctgtctctactaaaaatacaaaaattagccaagcatggtggcgggcacctgtaatcccagctactcgagaggctgaggcaggagaatcacttgaacctgggaggtggaggttgcagtaagctgagatcttgccactgcactccagcctgcgcgataagagcaagactctgtctcaaaaaaaaaaaattataaaagcataatatggagcaggagacagaaacaccgcctcctgccttgctctgtaacattctttctgccgcccatcctattgaaaaactcaacatccccaaaggagccacattctccgagagaagcagtggactaaggaaaaacagaaatttagattctggcaaatcagtaactagaagaaattgctgggagagacagtggtatgtctttataatccttgtaggtcattcctgatgtgctcaaccttagatgataatggcagaagtccaatttttctcttactgtacttgattttaaatgccagggtgagggtcttgcttcatataagcttcattataattaaagtcttaatcatttaaattattacgaaaatcacacttcagaaaaaaagaagagagaggagagggagagcatgtgagtgagtgggtcagttgggctagtggcgcatgtcctggtgcatgtgggttacctgtacagcactacacagcctaattgcaggagtgaccttcaaaggcccttggctgcagggctcccacaggaccagcatcttgtgacattttgctctgtgtacaaaatcccacaggcgctcatctcttatctctgcatatgccagtgatcacagccacagaaaccagaggacagagtataaaaggatagtactttgtctcctaccattttatcttattgtccctctagaatttatattttgtaccagacatattgtaacaataaagtcagttctaagaataggaaaaaaaataacactatgataccacaaccttattacatcaaactgctttgggctttatcctctttaaagtgtgctcaggtgttcagccacgaggtttctgacagccctcataagacctccaaggtgtggtgtgctgattctggcttccagtctttgggatccttcagagcttagagtctgtttgggagacagcatcccctccatcccttctggggaaagatttagaagcccctggcaatcactttgtaccaagcacatttcaagccctgtgaatctcgattatttaggatttggattctggcaaatcagtaactggagtaccctctcaacacagcacataatcatatatggtctattccaaaccaagacctttctccccaaacgtggtgttctccttttagaaaccaagccagtgcttttcacatggtgaaaatacatttcaaatgtgtgacaggctgtgaggaaaggctttcctgggcagactaaatgtataacacttgggacagagtatcttttcccaaatgggaaacaagatgatttgggtcaacctgtgctgagactgtgttggtgatgcagggatgttgggtgtcatagatggctttgtgagctgggaatctgaagaagcatgttctaatcgagtttctggcagtcctctccctgttgaacaatgaaattgtgagaccaaatgttgaccacgcggcacttctttgttaaagctgtcagcactcactgacgggataaaatggcaccagctgcacatggtcagagtctgtgaggccaaaacaaagccactgttctagaatgagccaattaaccacaccgtttggctgaaagtggcttctgcctgacatctctgaggtagatgcaaagtcccagttgtccagagttgaaccagtggtaaaaatgttaggccccagtggttctgagcggtgcaaattgttctaaggtgcagagtgtcagtccaagtcctgccaggagcagatgctaagatgggatttatttgggggaatgcaaggagtttattaaaggaaatgcctgtgtgagaggaaagaaagagggtgctggagttgactgggagagccatcagccccagctcaagcgcaagcccgagtaaaggagacagggaaggcagcttgtgaggtgtgcagtgtagggaagttttagcaaagcatccagatgcccttgaggcaaattaggccaagaacagccctgtcttagtatccctgctgtgatcagtccttgactgggagctgcctgtcaggggctccggccttggagcaaatgcagtgatggattccagagggtgattcgtcttgcacttttcagctccatgatcaaggctccacatctcaaaactccaggcggcacagtttattatcagtgatgcccccagtgatgtgccttgcatgggctgcacagctccacacgatggtcctgcttagggtcacttgctccccaccatggtgactgctcaggcagacccaccagtcagcaccatcagctactttccaggtcccccattcagggaatgtgggaacatgaagagattctcggagccaggcctaatgatgctgagacgccagcttctctgagcctattggcagctggggaggggtcactctcctagcacacatgttccaaatcccaaatgagaagtgggcacaaagccccttctcagtttttgacttcaccccaccttgccccacttatctacaaacctccttcctctgggtctttggccttttccccacattagagaggacacaccgtgaggtagactttccatttgcttttcctttctgaatagagctgcttctacattggtggttctcagctttgattgtaaatggaaattacctgggagtgttcaaaattccacttaggccatactcccgaccaattaagtctgacatttttgggaagggaagcagtcatcagcattttaaaaatctccctgagtgactccaatgtgtagccaagatggataaatccttctctacagtcctcttctttctcaggatgacgttggcctttcccgcttctcaatgactacaatggtaatctgttgcttaggaaatgtgatgtgtagtgtagaagaatgaagccgaagcagaataatatttctaatatattatctgattacagtttttatcatacaaatgcttagttttaacatttaggataagttattttggtttactatggttatagagcagaatgtcaatgttaccattcctgaccatgggagagcacgtgtgacagaaggcaggaagtgtaacaagagaaggaaagctagagggaaagtgtggagaacttgtaccctctaggagcattaattaaagatttacagataaccaatagaagagctagaaagttggctgggcgcagtgactcacgcctgtaatcccagcactttgggaggctgaagcggatggatcacgaggtcaagagatcgagaccatcctggccaacatggtgaaaccccatctctactaaaaatacaaaacttagctgggcatggtggcgtgtgcctgtagtcccagctacttgggaggctgaggcaagagaatcacttgaacccaggaggcagaggttgcagtgagccaggatcacgtgactgcactccaacctggtgacagagcaagactctgtctaaaaaaaaaagagagctagaaagttacgttagttatcaaaatctaggaagagaagagggtggcataagtaatatatatcaccattggttattgcaagagtcaacagctacaacctaaggcagattgaacaaaaatagcaacccaattccatgtggtgtaaatgtaagatgatgaagaacctaaaatagaaattgtaaagacttgactcgtaggggtggacctgggatagggaagatgtctgtactttaccttgtacctgtatctaaaaaaaataacaaattaaaaaatagatttgagattctatacctcagtgcatatcaaggggtagtttgggagaacacctccagtcaaggccatgttttctacaacaactgctgcatatgagaatgctgcaccctgaacccttgcctgcagcactgttaaatgcccaggtgacagtgctctgactctccatggccacgttcttccattttagtaagtaaatggcctaccacagtgttgctatatttattgtcttttaaatgttgtatcatacccaggagagagacagagaaagtaacattcatggagaatacacagagtgacattgcaatttaccacctcgcagattcctctgaccatagctgtaagtaatggcatcctattactgccagaaggtttagcagatggttttggtctatgtgccaggtgcctttaggtgttctgagaatatctgttgagataggccctgtgtaaatggagcactgtattgaatagaggaactgtgatgtcccatcctggctatatctaccatcaactggttccacatttttaactgcgacatttaacttctgtaggatcggcaaaatgaagggatccactgactcaaattaacatccagccttaacactttgcacatcaagggtttcttttagaatagaaagtgtcagtgttggactctagtctttgctaaattttttcctatcacctctattcagctttaaaatataggtctgcctgttatgcaagtgagcaacatgccttgtcttcaaatagactaggtgaaaattccagttctatcactttttggctggatgaacttggacatgttacttaacttcttcaagcctcagcttctcacctacaaagttgggattgggtgtttactattgttatgaggatttgaagctgcagtgtatattctccggttctaaaagattctcgataaatagcaacttttgttacactaaggaagaagttagaagaataccatgctcccaagattggaagacccaagatcataaatccacagggaaaagtcctatgtggatttgcagattactaggtcagatttttcccatttctctcatttgtaaagcaaccagccttctgttccactacagagtctgtgtgctagggaagactctgatcaccatctgggttcaacagaagccaagaaaaataacaggacagcaaattaaatatccacgggccatgtccccttcctgtccctggctccccagcctaagcatctgctgtggtttcaatacacctgaccttccttccatgcatgtcctttggtgagggttcctgtcagggcaagtattcctttggccaagtaaagaccccgctctcacctcccaaggtaactgattttcatcctttgaagttccttgacttgtgcaccttctctctgggttggggttagagctctcttataatccattaaatcaagtcctatattctcatcttctatctataggaaaatgagagggaggcagaagagtcaagaaaggaaggctatatcctaatggcaagtttattttgctgttggacatcacttactcttcagtttcctcttttttttaatagaagcaatatttattcagtcctgcaaaagagactttattattttagccttgtgactgtatattgtttgcccttaaagactaagaaggaatcacctgtttatatgtatagaaacctggtcatttgtttttaatttaacaatattgttataaagtaacttactgttgatttaattattaaaactaagcagacaatttaaatgtaatttaaataccatgtgttaagtatacaccaaactgaaacactacagcactcttcccagaagtaacatcctgagtagtgtaatttttttttctattttttccatctctgtagaaaataaaacagcactgatctggggaattggaggtccccacccaattgtcgttattaaactatctcacctagtcctgattcagaggctgcagctctgtttatccactttaaacaaaaggagctatctgttgaataggctctcttacagaatttccctggatatgtcaaatgtttatttttccatgtaaattttataattggtttgtcttgttctaccaaaaaaagaaatcacaatggatattttattgggattaattaagttaaatttaggccatccttacaatgagtctttcttcccaaagtagcctttgtgattaatcttttatagaatttacatttttcatttatataaacttttaatatttttgttgcgtttactgttgactaaacttttttgttatttttcctattgtatagttagcttttggtaatttaataacattatcgaagctgagtgccagaactattgtggttattcactgctatttttaacttttctttggagaattgtatgttaatattctttgtatttctagcagttattcatctttgttcttattgatttataagagtatttttaaatatattatgacttttttatctttggtttggaggtgtgagggtgtgagggaacttatagattatcctgtcctgcccatttttcctactaattaagaaactgaagtgagatgacttttccattgtcacacagaaacttagtcctgattatccaatcaggactaaaaataggtcttttgggtccttattttgaggtttttctctcaagtacttgcctccttgtctacagttttatctttttcctcttaaattgacactatcaggttacttgatttgattagaagtaacaagttggttttctacctctacaaatgaatcaccaagaactgattcatttcttggaagttattgacaataactcccaaatcttgtcagtgttggactgtgggctttgctaaattttttcctatcacttctatttggctttaaaatataggtctgcctgttatgcaagtgagcaatatgccatgtcttcaaatagactagaagaaaattccagttctatcactttttggctattgccaaaaagttgatatctcctttgaactctagatttttctaagacatctctccagttggatgtctcattgacattttcaacttaaccttttcaaaaatgaggggtttttttgtttgtttttggtttactcttgttgcccaggctggagcacagtggcgcgatctcggctaactgcaacctctgcctcccgggttcaagcgatgctcctgcctcagcctcccgagtagctgggattacaggcacctactaccacgcctggataatttttgtatttttggtagagacggggtttcaccatgttggccatgctggtctcgaacgaaactgagcttttaatatccgcttcctcatctgcaattcttagtctccttcatctgagcaatggcaattccattgttcttaatggtcagattcaaaattgtgcagtctttgactattccctttatcccaaacatccaattcatcctgaaattctattggcctattttcaaaatattgccagatatgttcacttctcccatctcctccaccctcaacctaatcaaaactacctttcacatcaatgattgtcatcactttgtatttggttcccttgctttatctgtaacttcttgtattttattgtcttaccacagctggagcaagccttttacaaaataagaatataacaatcttgaaccactgccctctttcctccaagtttctttttgttttctgatatcaatttccttaattcactcatgcctttgtttgtcttcaaacagtataagcgtactcttgcctcaggacctttgtacttactactactcctttccctgaaatgccaacctccacacatactcaaatataagcacattggctgcaaggatattttctgctttgtggcttctgtatcctcaggacctagacagtatctgacactcagcaggtacacagtatatgattgcagaatgattgattgaaccatacttactagcaatcatttttggtggtgttgtgaaggatattttgaggcatcatgtggtctttgcagaactggttgaatttctagaactaagatgatactgctcacttactgatttatttgctttagaatgaaattcaaattcctggccttgtcagtttccctcctttctctccctccttctccactctccaatcacaatggtctcttttcacctccttgaataagccaagcctttgagccattttgctggaggtgccccctaaggagaaacatctgtttctgcatcttcacatagttgactcctcagagtacatatatcaacagcaaataacttacctatcacttctaccacatattgccagaggctcacatttcatgacacatagtgggtacttacaaaatatttggagaatgaataaatgtcattagcctagcttctaaagatcatgagatgcatgcccccatgacagcaccagccacatggtgctgaaatgatatatttgtgagtctgtctcccacagagtctgggagaacctctgagacagatataatgtttaattcatagtcactgccccaccgtctcctacacctagtggcatctagtggtattccatagatgtttgctgaactaacatgaagctacagaaaggcctttagccctcttcatcaaattcatttcacttgagagatggggaatatggagcacagaaggtaaaatattaaaaaatgaatattatgagatggctcaggaaggccttatgaggaagaggacaacgcagagcaaaggtgtagagaaattaagtgcctagaattagctcccatagggagaagaaatgcagcagtgagatcatcggtttaggtactcatttcagaacaatgccaaccttctggtgctagaaatttacaaggcctttttttttcaaggctaaaaaatgatgttactgatgtgctatatgtaatggttcctgtgagtaagtcatccttttgactaccaaagcatactctttatagtagctgtttcaatgttccccattctctctctctcttttttgcttttcttctccaaaccccttttccttgcagatggtcttatctcctactttgctgagaaaatcaaggtcattaaaggggaaatctcctaaccttccatcttccccaccaaaattatctttaaccggatatatgtcccctcctcatcctcttctgtcttggcatcatagccttccaatattgaccctaatattacatctggattcctttctttttttctttaatcatctgacatactgtatcctcaattatttccagttttccagcattatacaaatcttttttttccactgattccttctcttggaccttcaaacatacacaagtctttcttgtcttgcaaggaaataattgttgccccccttcaagccaccatattttcctttgtggctaggtgtcttatatgccttcatgacttaactctctctattctttcaccatatagtccttcactatcatggaatcctcatgtttcaggtctcagctctgttaacatgagacatcccagaggcttctcttcttttatttaaaaagtcttctttaagagtttttctactctccccaataaaacaataaatctatttccaggatcactgagcacattctgagggccagacactgtttgggcatcattcatcaaacatttgaatgagtcatagaaataggacactggactagatggataaacattgaggcaaacataaatatgtttttccaggggtacaaagagaaccaaaatttgaaaaactttaaaaagaacaaaccaacttagaataaaaggtataaaatggtaccatacatatgtacacatttttttatatactgtagagggtggtagatggacaactagccgggtttgcatctgaggagccacactggtggaaataagggccatgctgggacctgcagtgtgagtagggttagctaccttaggatgggggtgggttggatgttgcaaggaaaaggaggagtacagtcaagcattataggaaaaaatgtggcacagtgtggcgcttgccatcatgcacccacattcactggagactttccttgcttgcttcatattccatgggagttctgagttggagggaggtgtgtgagggactactccacacagttattcaggaacccaggattattccttcttgtgcatcttgtaactctgtattgtttagggcttcagtaaccacaatgtggttcctggcccagcagcaacagcatcacctggtaatttgttagaaatgcagattcttaggcccaccacaaactggctgaatgacaggctgtgagaggatccagaaacaaatgttctaccaaactgtccaggtggttctaatgctcagtcacatttaacaactcctgcccaaggcccggcagaggagggtagggcacatagagatcacacaggagagttttcaggtgtcagccccagcagtagcacatgttgcttctgtccacagttgttggttgctgctcagtcctgaagccctgactgactatccaagaagctgagaaatagcccagctctgtgcccaggaagaaagggctcacctcccaactgttcttcccactgccagtctgttccccttaaattcattcacctcagctaatcatgcaaatctgtgatgaccctggctgactgaaacttccacgggtcccatggccttctgaatgacatttcttagtcccacaaaggctggttcctgttgcctctctggcttcatggtttgccatcccaccctgaccctgaactctaaactccagccgtcttaaactattacaaaaacacctggctgatctttacccagccctgtgccttctgctctgggcttttgcaccttctgctcttcccatggtcctttgctcctggccattcccattcatccttcagggctcagccggatgtaactttgtctggaaatatctccctgaagccactctctacctcccctccacccaagacagggttagatggtctctactaattcagaataatccttaattactttggcttgtaatcacatcagtctgtggaaggaagactgtttcttatatatagttgcttctttgttgcctgtaaagagcttggcacatggtagatgctcagcgaatgtctgctacgtaacgaaagcaaagtggcctactagatgtttagtgggtgcttatcgatgaggacattgattgtctatctcatactttggctaaaatttattattaacgaattcactcttccttaattaggtactgcatcttcattgcagccaagaacttcaccactgactaaaagcatgcagccacgtacaagtgggatggggggaaggaaatccatccccatggacagaaagttaactcaaagcctcgctcggctctggtcacagtcagcccatctttttcacagacaaaaatctgcatgtcttcatcttacattaatttacatatgtaatttacctaataggaaaataaggaagcacagtgtttgaagtgtaatcaaattacattgtttagaaaacagagaaaaataaagcttcctggtgctggcgggtcaacaaagatctctcagtagcttactcatccaccaactgaatcagtcccctgttcctgtcaatgcttctgccatgactcattctggtgggcaaatttttaatagaaaatgataaactcagggatattcaccttaaaaatatgacaacacttcccagggacatgaaaataagtagtattattctccaaaagttaaaataatacctgtactcagaacgtgagtagcaaccactgtcttccccttgcccacagcctccatgactcatgaccgcattctctcctggacattgcctcatcagtgactgccatctctccctctctaactgatttttgtgttggatcctccaataaggagacacctagttggagttaggagagcacagggctcactgaggaataagacatgcggaagttgaatgaagcagcagagttgtgcagggagagacagaggtggcatcgcctgtccagggtgcgcagctagtaactggaaaagccaggatcaaaaccaggcaaagcgagctccagaaaccagtggcctgaacactgccttgtactgtctgtgtcttcccctgcccagatggatagtgcattttattcatactgaaataatagctgttcataattggttattatgagcctaacactccactaagtgctttattaaatgcattacctatctatgaggtaggcgtgggttttctgacttttacctattaggaacctgaatcgcaatgaggttaaataacatgcccagaatcactcggccaataagtcggagaatcagaattcacatctcaaatttatgttctccactctgactccagggtcttttataccgctatttcttttgagttatttctattcatctttgtagttacacaatccaacaaaatataagcattgaataagagtttcctgaattaataaatgaatgaatgaatgaataaagtgcttttccagaaattctgtccagaattatgggtattgtggtcatttagcaaaaagtaggtcattttagtaagcaaatactgctcccaaagtttcagtttctttttttttttttttttttttgagacagcgtctcactctgttgcccaggctggagtgcagtggcgcgatcttggctcactgcaagctctgcctcccgggttcatgccattctcctgcctcagcctcctgcgtagcagggactacaggcgcccactaccatacccggctaagtttttgtagtttttagtagagacggggtttcaccatgttagccaggatggtctcgatctcctgacattgtgatccgcccacctcggcctcccaaagtgctgggattacaggagtgagccaccgcgcccagcctcagtttcttttttaattttagctatagcttttatgtaattaataaaatttctagttgtgaatacattaaacatgcatagtagaagaggtccaagaaccttaacattgttgttttggtgaaaagcaatcagtaagccaatgactctcaagcttttacatgtacaagaatcactagggcagcttgttaaattgcagattacgaggctctgccaatcacaggttcttattctgtacagctggtaagatgtctggaagtctgcattttataattatcctgagtatatccaatgcagatggttcctggaccacatcttgaaaaattcagatggaccagtggggctggcagttgtctaatcagcctccatgtcagacatgagaaaccttgaaacacacgtagcttttcaaaaggataaaacagtgtgatgtccgttgtttcctataacgatttcagagctatattataagacctgagacctgtagcacaaatgcatgtatgtgccaaccgaatcatacattgtgcatgaatgcatgtatgtgccaactttgcttaactggatcatgctggacagagcacttcataactatttaaaacttggtattgatctttagaagaagagctaatgactcattttgtataatcaatgtgtttatggcatctcagaagagttttatttttctactaatgatatcttactgaaattaaggtaccttccactgtaagaacaactcttctgtatatgtcactgagaaggaaaataaaaagctcaaagtggagagtttaatataagacaacaaagagcactaccctcagatgagactgaagaagatataagagatggtgccatccgggcatggtggctcacgcctgtaatctcagcactttgggaggctgaggcaggcagattacgaggtcaggagatcgagactgtcctggctaacacggtgaaaccccgtctctactaaaaatacaaaaaattagccgggcatggtggcgggctcctgtagtcccagctacttgggaggctgaggcaggagaatggctgaacctgggaggtgaagcttgcagtgagctgagatcctgtcactgcactccagcctaggggacagagcgagactccatctcaaaaaaaaaaaaaaaaaaaaagagatggtgccttggtttatggccctctaaaagcagatctataggccaaatcttgagggcaggtgggttacctgggaggcaatccgaggaagcacatgtgaggaggtggggaaatgagaccgagaatggaaggcacccattgaagtatgatcatgagcagactgtcattgttagcagttgggactcaatcccactgaggcctctgtgaagcattctgtagaacacacctcagaattgtacagtcatgggtagggaagctgggctgttacccagtgactccctttccttattggttgaagtttgtctgggggtggggcgagtagatctccagcacttttagtgaagagcagtcagtaagcaaatgattcccaaattctatgcgctcaggacccctgggctgtcctctacaagggctgaacaagctacattggtgcttttggtggagaagtagaaaaatgtaggcacttgaggagggataccatcagagtgcagagatactgtcccctgcagctgcagtggagctcagaggtgggctggggtgatggcccaggcatcaacaatagctgctccaaatagctaggagacttaggtgtcttaattgcggcattgattaatggaggtttaaaaaatgtccccttaataatttggatcacagtctaatgctaatcatgcaagtttgtgtcctaaattcatacaagtgtggttcatagaagcctcagttagggactttaagtggtttcaggttgataatgctgcctagtgtgactaacaaggaagtgcaaatcctctctgtctgaatgtggcttcaatccagattaatagcaattgtaaggctattgatcattctattcatttcaacttcttcaatgtgaagatgtagaaaaaatgtcttcaaaacaatgaaatacagtagtaacaaatagctataaaaaatacaacttccttcctacataataaaaatgtaaagagcactactttttcacccaacccatgcagccatgttcacacacacacacacagacacacacacacacagacacacacacacacatgccaactaccacatagcctctttgtaatggaggacattgactggtaaaggagagcctgccttctttctttctctcaggtctacaaccacgcaaatgatcaatattctattgaagtcagccaaatagcaaccagattaaatacgacagaaccaggaagctgaaaattgagggtagctattcgtataactcttttatttgctcaaaggaagccacagggcaaagggggagggggtgttcctgcttctagctgcattattttcaactttcaaatttttttttacgagcaaaaatgtctatgtaattctataaaaagaaagaaattaactctgctgggtttttttcctctttaaaaagcctgctcttcaggtttttatttgcagactggtctaggctttttgtttgtttgtttgtttgtttttagaaaagcattgtgccctgagatcaataaatcaaaactggattgccttcttctcaaaggtgaattgttatcttgccgaagaagttatgtgacagactctctagtttggtaaaaatacatgaacaagaaaaggattaaggtgtctttgcctgaaaggaaaattctggatgctatttttttctatgatagggaaagtttcttgaactgtctcctggaacaagaggttaaatgtcagtagctaaagcagctgtgggcccattatttggtgctcgcagagtccattctgtcattggaggtgctgttttcacacagagaatgaagtcagcttgacaactgcaggaacagctgtggcagcctgagatatgaggcaaggaggcaaagcccaaacagagggcaaagaacatctgtttgttgtcaacattctgaaaaaagcaaaagattcttgactatgggagagaccagggtacctggagataacagcagtcaagacaaaagcaattttcagcaggcagaagtcaatcaagcttgaaggaaaaggccagttaagatgcttagcacccaggggttctggaagagtgctgagccacccagagatgtcaggcctgagtggagctggtgctttgatatgaattcaggaagccgcctggggatggcgggttgggggacatcatcacagacccaactgctgtggattgacctctgccattactgctgggaccccaggccctctggtgctcaagaaaaccataaagccttgtgctgcctcatttttagaatctgttccctggcattctaaaccatgccataatgcatttctaaccacagggataagagatccaaagcaacattaatctggttttccagagcagggccacagagtgatcccatcttagagaattggccgggcatggtggctcacacctgtaatcccagcactttgggacaccaagacaggtggatcatctgaggtcaggagttggagaccagcctggccaacatggtgaaaccccatctctactaaaaaaaaaaaaaagaaaaattagctgggcgtggtggtgggtgcctgtattcccagctactggggaggctgaggcaggagaatcgcttgaacccaggaggtgaaggttgcagtgagtcaagattgcgccactgcactccagcctgggcgacaagagcaaaactccatctcaaaaaaacaaaacaacaaacaaacaaacaaacaaacaaaaacaaaggagaatcaaaccaccaagctttgatcctgaaacatctgaaggggaatgaggtccatgctacagggctctgcagatcctgcaggaggggagagcctcagtacaccaccattttactgtattcactgccacagatggtgcagatcatagtgatgtccctggcatgtgacaggaacttactgtcttcattgtgaatgagtttacttgactatgcctcccccaagaatctcaggaatatggaagatgtttgagtccattactttcaagtggattacagttgaccaggcaggcctgtgaaagaaagtttagggccacctttcaaattccagccccatttcacctgcctctgcaaggctctctcaccactgtcactagtgatggggtggaaatatcccagaagtagagttaggagaacatttggtcccaacctcattgctgggtggcctggagaagtcatgccacttctctggggtcctctgttcacatctctaaggggtttaattggactgggagacagtcaaggagttttttttattttttgaggaaagtggccctttttcagacaacaaaagacaacacttgttcataagcctaaaaagtggaataaagcccctacgaggagggtttcggcaaaggtaacatcaacatctcacaggtagctttgacttctccttagccaaagtcatctggctgagtttagtagcacttttggttgcatgtttagttaatgtgacctagacactctttcaggtgtgtgtatgtgtttgctctgggagtaattaactctcagaaggcataaaaatgtttaaacccaacaaagatcaaagattaaggcccaagtatgtgtgatattgctttgtgaaaataagctgcctagaaaatgggctttcacttaatgcagatgtgtttggaaacttctcctagtaggaaaaaaattctatcatttttctctgaagctgaaagaattggtgttgagagactgagaccggaaatggaattagcttagcagaaccgcatgcatttacttccagttcagagccctcagacagccttcctctaatgcttctgtaaaccagcaagattatttcttggatgcagcgtacatttctagtcctttggtcatggacaaaggtgatgcactagattttattaaatattcagaacaaattatgctatttaggaaaatgtgacctacaaacaggacaagatatagcgcaaataattaaagacatctataattaagaatgtataggattaagttattctttgactgaagagctagatacataatcatgcaggatttcaaccctcgccatcagagatgcttcttctgtgggccttaagtgtatgatgaagtttcaaagaattcagccttggttattttcagcactaagttccttccttgtgagatttcacataaagaaccattgaaaagacagaagttgcccccactgtggctccttacatagttaaaaccctattagagtaaaagaatcaagaaactcctctggaaaaagtacatatctctgtgttcactaggaccctgctgtgtacagatttagctggtttctgcagagaaacaaaagccacaaaaggtgcatgatggggtggaggggagtgttagagacacccaatttgcattattcctgctggaaagaccctgatctgagatcagctctggcagcccccagctgagaagggcctccttatagtcttcatttcattccagccaagccctggaggggtggagaatgcataatgaggctgaatgagaattagatgcttaattgaggcctggaaaagggaaagaaaaagccagacatgtggaatgtgatcagaatgcagctcagttaagccaaatgtgatgacacctgggaaggcttcagtggttgggaccactatacagagaagctggaactcctttgaaactgactcatccatctagttccaactcaaatgttattttcttgtcctcaaagatttttcttcatcctcacaaaaggtggctcactctctcctttgtgcatccaccatgcttggttcatatgacagtgcttgccatttggcctcgtgggtgggggatgactttctctctgcgttggctggcttgtgaactccatgagggcagaggtgtgcctcattcattttgtatcccagaacataataggcattgaagtacctggtggacattttttttttttttgctcttcttcctaaatactgagttctctgtagagtagttattctgacgatgactgatgaagcatttccaaaccattctcaaagaggcatatggaggcatattatctggccaaacataaaagtatttctatatatcaggatctcgtgctcaccctcagctatcatcactgcctttcatcacttggtaaagacagtttctgattttgattagggtagagtattcccaactaatacatgaaaatttctgttgccatggaaagggtcttttgtaaaaacaggcacaggcacattttccacaagtatgttcctgtcagtgtaatcattcactatttgactttggagagggggccaaatgtgtgtgtctacagtgtttgtccaagtgacgaagagaggttcagtggtcaagtagcagctttaggatggaggctatttggaaaaaacagactaggtgagtaacagatggcatacaatcaattgtatctttgtcctaaagaagcatggactaagtgtaaatcaagtgtatccatctgctcggctgccataacaaaataccttaggctggggcgcttaaacaacagaaatgtatttctcccagttctggaggctggaagtccaagatcgaggtgctgctaatttggtttctggtgaaaatttgcttcctgtttcatagacagccgtcttctcaccgtgtcctcgcatggcagagcagagagagatttctctcttcttctttgcataaggccacagtcctatcagattaaggtcccaccctcatgacctcatttaaccttggttgtctccaaaaggccctatttataaatacagtaacttgcaggttggggctacaacctttgaattttgggaggacacaaatactaatccatcatatcaagtctgatcagaaccatcatttgaaaaatattcttgaaaccagctgctggcaaaggccaggtgcatgtgacacccacaacgaatacctagaagaatcaagagcctctgaacacctgatcttgggtgaaagaaggtggtgtgtagtcacattttaaaaccttactctcctccaaacttaacaatatgaaggaagagaagtaaaacaggcaagcaagtatcatcaacaaaaacagtaattaaacgaaagaaagggtgggtagccagcaaaaggaaggcacctttctggaaatgtgcggaaggaacgagcctggtgttgccctaccccatccctaactctacaggctcagaaatcatcctgaataagatcacaccagctaccatttacctccctaactaggagagaaaaggccaaggaaatttccacaagagcatgaagtcagccatgaacaccttttactcagtctttccccagagaaacaagaataacctttgtaatcctccatgtcaatacctctgaaggaaaacgggaaagaaaaagcagaccaataacaaatgactagaactaattatctctagcaaaatcccgggaatttcacaaaatagaaaatttaagaggacatacataaggcaaggtctctggcgtgaacaagaaccagggaaggaggtgctagcaggccccaggtgatgcttccttgaagaaggagccaccttcgctctctgacaaggctgcagagggtttatcacctgctagggtggaaggctaagaaagaaaacagcaaaagggaacagaggaactttcagactgactctttctcctggaaagttctgagtctcatgttgaattgaaggaattatccaagccccaaagatagtgcccactatgggaagtccaagccccaaagatatcccccactatggaagtccaagatggcaactgtgcagacaaatttggggggaacctgggctgggcgtgggatatgctatatacttgctgagaaatccaacacaatgaatgtggctgctttacccctcccaaggaaaacctccaaatgaaaggcttctaggcagctgctggaggaccaaggagccacagagcagtatagaaagggagcagcttgctgacatgcatgtggcatacacatcaccctgcaagcacactgaaaccttgactgagaaagagagggaaggaaggaagagagcaagtgagcatgcaacccagtaaagggcaggtgaagaacgtactgtggaagaaaacataacccaagagaaagatccaaattccctgcaatgaccacagatgaactttgaaaaaatgttaacaagcttgaagatgcagtgataaaaataacataactgatctgaaatgtaagaactaaggagataaatgttccactcttagagaaataaatcagttaagaacagcaaagaccaaattactgacaaagaaaaaaggttgagattttcacagtgaaaatataatacatatggaagagaaaacacaaaaattgctctatgtgagaatgataggtgtcgctgaaatttagaagtcaatgtatagaacagaaaatgtcttaaaacaaagggaagctgaattgatgatctaatggtcaaaccatgttttaaaaaatcaatacagaaatctcgtcctgaaacacatctttgataagtttaacgatttttaataaagaattttatggttatactggcacatgacatgtcacttaaaaatacctaaaacttttagaagaatacatagttaaatttatttaatgtatcttaaagaaaataaaaagatgacaatccaggagaaaatattcacaatgtattagacagggaagggttaattttcttagtttagaatatacaaaaatcatggaaaaaaaacaatcaaataggaaattggtaaaatataaaaacagatgacaaaagacagggaggaggaagaaaagaagggaggtagaaagggtaatttcactcgtaatgtaaatcaaaacaatgaggacatactgttttcttccctgaaaagtttgagtatactcactgctggagattgcggagaaatcattatcgttatcattatcatgctctaagtgatctgattgatctgacctttttggaaggaaattttgtaacatctatgaagattaacagttcacatacactagatctagaaattcactcggaattcatccttgggaaatatttacaaaatctttccaaaatataagtgcaagaacattcactgaagctgtttgtaaaagcaacagtgtagaaacacatcagaagtccactgatgtgggcctggataaagaaattatgatatatctatatttatgcaatgagatattaacacagattacaatggcatgctcatcgatatatagtaaatgcatatattgaataggcactaaaatcaatgcacatattaaaatgcaatactaatcaatgcacatttgctagtacctgctaataaagtatgtacgtattataaatacatatatttatgtagaaaataaaaaggccagactgcagagaatagaaagtatcatctatattttaagtaaatgaaaactgagatgagagagggtatgaagtagggcaagagtgggaaaagagcaaagagagagaatgaaagagatgggaattgtgtgcattatttttttctgggaaggtaataggaacattttaacatggaaagagttgttcagggtcatttttcattagcatttttctgagcagtttgaaagtgttaattatgtgtaagtgtcctttctgttgttttttaatgtcactacagttatttaagggttaggtttattgaactttatctttatttctatttagaaataaacgcatgctattttaaaaagttagcatatagtatgttttcacctgtaagtgggagctaagcaatgagcacacatggaataaatatgggaacaatatacaatgtggacccttggagggtggagggagtggagtgggtgaagaaactaccaatcgggtgctatgcttaccaccagggtgacaggatccgtactccaaacttcagcgtcatgcaatattcccaagtaacaaatctgcacatgtacccctgtatctaaaatgaaacttgacattaaaaaattatatattaatatctcattaaattgtagtttgttttggttaattaaatcttcataaaacatgaaagtgtccataataataagtcttaaattcaaggaagaaaggaagaaagaggggagggaaggagaaagaagggaggcagggaaggagagaaggagaaactaggatgcaggaaggaaggtagaggaaggagggaaggagggacaaaaagaaggaagaaaagagggagggaagaaagaaaaggaaagagggatggatgagaagagggaaggagggaaaaaattaggatacaggaagaaaggtggaggaagaaggagagaagaagggaagaaagggaggagggaagagaggaaggaagagaggaaggaagggcaggaagggagggagggagggaaggggaggaaaaaagagagaaggaaggaagaaacaaaaggaaaatgaggaaaaggtaagaggaaggacaggagaggaggggaagactctggacaccctatctactaagaggtaaaaactgaaaatgcctctgaagagcagcacaatgggttaaaagcctttgacttattttgcgtgactgtgactaaagaatttaaacattacttttgactaaaaacaattattcttggcacttgttaattaaaacagcccatttccaactaaaaacttaaagactgagagtaaaatagctacatgttaataaagtttttatatggaatctgacttttaaataaagactggaccaatttacctatagtaaattgaaaagaataaatcttgttccaaagtcagaaagagagactgtgtgacattttatttttgatacttatttgttcttcatgtagatgtagaatgcaagaaagctaattatggacaaggagaaggaataaaagaaaaatacaatgccgaaaagcaacagtgctttctcctctgagatttaatctagctacatcagagctctaattcatttaactttttaaattaagcttcatacatagtaggtatgcagcacaatatgctggctgtataatagaataatgaatgaatgataccccagaggagggatatgtggtaaattattgaatgatatgaagaggtgattcagctaggtttgtgttcttaagggtcagtgataaagagatacccagaagtagccaataaatattaatcaggcatttatgatagtcagtcattatgtctttcaatcctccagttttatgagagagttatcattaactccctctacaagtgacaaaaccaagactctggaagtgagcagaacttgcccccaaatcacataaatagaaatgccaggacttggatttgaaatcagctctgcctaagtctagtgagttaaacttcatcccctttcactaatagtgacacctctgagaaagatagccagaagtaagcagacttgaggttcagaacctatcacagtagggggtggggtgggggagaaagagaaagggagagacacagagagagaaaaaatcaaaggcatactcaatgagagaaggaatttctagaagttggagttgtggtttgttgaatggcatttgttgtagggaaagtggggtaaattgctacctgttttattttgactcctttcacactggatgaattttaagagcaagtgtttaccccttgcacccctatggattttcacaaaatacctgaatatgaaacctggacattactacagctatgtgaatgaataaatccatgccattatcaaggactggaatgcttttttagaagttaaatttatttagtttatggctgttggaaccacatgatgattattttagataatgctgttgacttcattataaggagcagtttgtgggaaagcatcattacggtatagtgtaccgtggactcagcttctcttcaagctggtgttgatattgacgctgtgttattcctcattaaattggtctttgatctcctttcacttagttgcacatgcattctagacctagacagtgaactgggaagtctaggggaaaatgaaatctaattgagctcatcttttccaacaatcattagcttaaaaagaacataaattcgtgtctgtgcatatggaataatagccttcttccatccgagcttgggagttaaatgtacgtgcagatgccctaaactccaagaccagttttcttccattttagaaccataccacagtgagcacagtttattttttgtttgtttgtttttggtattatattcagttttaacactttattattattattttatttttccataagttattggggtacaggtgatatttggttacatgagtaagttctttagtggtgatttgtgagatcctggtgcacccatcacctgagcagtatatactgcaccatatatgttgtcctttatctcttgccctctcatactcttccccctaagtccccaaagtccattgcatcattcttatgcctttgcgtcctcatagcttagctcccacatatcagtgagaacatacgatctttggttctccattcctgagttacttcacttagaatcatagtctccaatctcatccatgtcattgtaaatgctgttaatttattccttttaatggctgagtagtattctatcatataactaatatataaaatataatatagaatataaaatattatatataaaatataatatgtaatataaaatattatatattatatataaaatataatataaaatattatatattatatattatatataaaatataatataaaatataaaatattatatattatatataaaatataatataaaatattatatattatatatataccagagtttctttatccactcattgactgatgagcctttgggttggttccacgattttgcagttgtgaattgtgctgctataaacatgcatgtgcaagtatctttttcaaatgtagaactcccagttaatccagcaatcccactactgagtatctacccagaggaaaagaagtgagcagagtttagcctgttaagggacttctcctttgtatacattaattcagtgtttctcaaagttatgtacactcaccatttgtagtttgatagatgattttaggtgatgtaaagattaacacattatggcatgttaaaaaattagccacaaatgaagctcaagatttcatagctataatttctatgggacaaaattaagaaaaatttagaactgaatcgattagaagtgtattattatgtgtgttagttagctatcaccacagtaatgtaatgcttcatctcaaaccatcttcaacctcaggggatttagaacagttgtctgttcttttgctcatggatattaggatcaactgcaactagtctgggccaggaagtgtatccatccacatgagctgagtcctggtctcatcctcctcggatgagctacccctaaagcatgttgtccttgcggtaaaaggtaggagaaggaaagccccaactgtcaaatgcatttcaagtctctccttgacacacttctgctaacatcccattggccaaagcaaattttgtaattaagcccagcatcaagagagagtgaagtagattcccatgagggtggcaggtaggaaggaaacatttctgaacgcattatctaatccaattacattaatagtgaagttggaacataggtatggcaaaagttgtcaaggtggttcaagaaggtttgctttcggttgataccactttaattcaatacaattgaatccagacaggccctgagctctgtacctatcatgtcacctatgcaactacagattctgccaaataattacttgtaattctatttgttgtgtgaagtttactgtcaatacacatctcaaaagaaaagcttggaggactcctcccccggccagcatctctcacgtttatatatttaaaagtctaattaactacattctgtgtgcatctcagtatcttttcttctatgatgacatctgcctcatttattactttttatgtaactccactaacctagaaaaaattgctataatcaagggtttgagcagtacagttgcagttgttgatagaaaatgaaaatagtactgaatgtcccagactttttctatttctgcatcttttatcccctgctaggagctctggaatgtacctcttgtttgtgtttcaaccagcagcaatccaaatggaaggagggacaggcaaactgtaataaataggccacagaggccatttttgtttttatcagattatgttgtctatgtgaaatggattcatttctgtagggcatccagttgcactgcccagcgatgtagaagctattaggatagtaccagttccacatgcatgacacagtaagaaatatctgtcattcctctcccactttccaaacaaacaactcacacacacatgcacgcacgcacatgcaaattcacataaacataccattgcacacatatgcatcatattcacagtgcatgtccacacatacaggaaaacctcatgtgcactcatgatattaaattaatgaacaatctctaccaaacatgatattggagtcttggaaagcagatctaacagactatacttccctctgctccaggaatatagtggtatacagagctacaactttgatttctgtttttttctctctgtttcatggatttcaaatctgccattgaatctcatactaatctatgccaatactgtggcacaacctgagatttctcacacattccattgtgaagtgaggttagaaggacaagcatagggctagaaatttaaatgtttactgttttctgatttgctatttgcattttgctttcttcaactttttcctctctctcacctaacttttgaaagtgttttgtaccctcccttatttcactaagcattgtttaatagactagaattatgcctattagatagaaagttctctgtgataccagaggggtttccccatagtaatgtaaccagggttattaccattgagagtaacaacttagaaagatatttcctgaaagaatcagctacaggtacctctagatcccatcagaaacaaggaccctaagaaaatagtcaagaaagtaatgcttagatagagcttatcaattaatttttccacagtaatcatttcatataaataataataatattatattttaaataggtctgatgatgtcccagagagttaagatgagtcagaatattttataatcattttactagtgaaaaagccaaggcttttaagtgctatgagatttggtcaaagttattgaaaaaattaaatgaccagccacaatatcctcttttgtgacacgtctgtttgtgtcttgtccactttctgttgggttccctgtcttttcaaggttattttgtatgtttatttcttatatattctgtacaggagtcttttggcttattttcctctcccttagcatgttttgataaacttattttaatggttggtgctttgtcctgtgtaagaaattttgcataatgatgtgaaggtctttgtccacattacctttcacatttatttctttttgagggtaggggaaactatttcttcagcataggtctgtggacaccaaattctctcagtcatattctctgaaaaatattttatttcaaattcaaatttgaaaatctttttttttttaacacttcaaagatgtcattgcatcatctctggcttccattatttttgttatgaatttatctataagttttattgttattttgaagttaatggatctttattcactagataactttttttttctttaatgttggttttcagcagtttcacaatgattagactgagtgatagtttttttcattaattttgcttcggaatcataacagtcttgaaacagtggtttgagatgatatctgatatctttcattaattttggcaaattatcagacattatctcttaaaatattccttttgctctattttacataggataaatcctatctcatatggttccttcactcttatctggggttttcatctgcaatttaggcttcgtatctttttccgacctagcttttggcttactaatcacctcttcaactgggtctacctgctgtcaaaatcacctatttaattcttaacttgtttttgtggggtttttttttttcggttctagaattttcatctgacttttgaaaaagtatccagctctctgataaactactttgccgtaaaaattattcaacttggcatccaatttccaaaatacattaattgttatttaagctgcctctgcaatacctggatctctgatgtctatccatatgtcatctcttttattctcttggttttcagtgacttgttcttgttcctctgaaatgccaggtaattttcgcattgaattctggacactgtttgaaaaactgtagagataacttgaggcttttaatcttcctccagagaagatttacttttgcttctgacagcagagcactataattcaatcaggaattgtattaattaaaagttagacttcaggtttttttaaagagatggtctatttcaagttcatgcttgtccccaggatataacccttcagggtaccccaccaaaaacctgaggtagttagcagggtacctctccttggtagaacccaaccttcaagttttgctccctgcccctagcctcacaaaacacctgcaggctctattcaacttcttgacacatgtgcaatgtcagcttcaccattttgcatttcctcaggtttgtcctgcattcatagcactctggggccttacaatgctattttaaataatatgttcagtgtttctagctgttcttggtagagggttagtctgaatcattacagtccaccttaggcagaatccctttctcattataattttaatttgcattccttttgttgttagcaaagtaaattaccttttcatgtgttttgcaggccatttttatatcttcttttattaactgtctgttaaatctcttgtccattttcctattaagttggtggtcttcttcatctccatttttaaaaggccttatatattaaagattgtagtaacactttgtctacgataaaaggtgcaaatattttccctcaatttgtagctttttaaacatttcttttggtattttttccattaaaaagtttattatgtttataaagtcaaatattttgttcttgctccctattacttctgtgttctaaggcataattagcaaagttttcctgctcgcaggcttaggggagttcacaaatggtttcttctgtaattgtgtgttcaaggagtatgttgatgaacaattgaaaaatgatatatttctagaataggcagtgtgagaaaggtattatatagtgttaacaagtccagttggaagttccaagttttgtttttccttttccacctcattctcaggagctagtgaaaagcactgtggacacagtgactttcatcttgtccttgaagagttgaggagaccatgagtcctttttttcccttgtgttatctttttcctgagttctttcatctactttcatactatgaatgttaccctatcttggtgtcccccaaatacccacatgttccattcataattctcttctcataattctctccccagtgctagatgcaaaacttgtttgatatctcacataaatgcccctacacttcaggctttaaatctaaaatgactttgttcttcttttcccactctgcttgttttatatgtcatcaattaatgacctctctgccattcatctacctaagctcagagcccagtcacctttgaatcatatttcttaattgtcaacctcaatacaccattaccaagagtacaaattctacctctgaagatctcttcctttgtagacattataaactggatctttcctgtccttgcttttttctcatcaataggcacatgaagtttaacatactctggacacagtaagtaatcaggtaatgaaaataaatttaatcctctctttaaaaatgtacaggaatcataaaacctttaaaattatgggttttctagcactttatgtatgtatttgtatttacaaatgtccttgctcttcaagttataaaaacttaagagagatttaactaagaagcaagaaatgattgtccttttgaatacctggaaatgtttttacaatatgaaacacaattcctttactacattgaagcatcttatcgaagcaccttgtgaagctgtgcaaatagaggccagtcacaaaggaaatctactgacgactaaattctcagcaatccgaaatggcagcatcagaggtctcctaaggaaacaactaaaccatttgtttctgtttaaaaaacaaacaacaacaacaacaaaaactctcactaccaggagaatgaatctttcagctttcagtcatgcctaaggcaaaattcattttctctttttcttcttctaaggttaaactacataaactctctctcacacccacccatgcatacagacacacttccctaaatttaaactgtaggttgttctgaggaaatcaacttttcctgctgtcatgctaccagatttctaatttgagaaactatatatgtatatatgtgatcatctcacaaattaaagagaacttagaaggccacacaaaagtattcaagcaactcaaccctctgtttcctcttttaaccttttctgcaaaagaagttgaatcccaggagtatttttgaatttaaaagggcaatggagggtgacagaaatgattggccctcaggctgttataattctctattcatcagggactgtggtctttttctcttccagctccaggcgaggacacacctaggatgcctgggaaaagtgaaggctccagtgacctagaaaatactccaggtcctgatggtaaggttctgagctattggagcccatggaaactacaaatctggcatattttctatgtgtaatctaggattaagggaactatctgttctataaagcaacatatttggttagaacacagtaaatttcaaaaacaattttgtgctacaaactaataaaaatggcaacctcttatttaaaaaaaaaacctgtttctagctgttttaaaacagcatatgtcctggtttaatcatatcttataatactgaggactcaatagatactttcaagactaaactgaactgaagtctatctagtgaactttatggaagcattacttacttctgcaaaaggtacttagcctacttagcctcctgttaccctgctccactcagcattcgggagagccctacctttggtgtgggctaagattgttcttgtaccttcatcacttcactccactgtatcacatccattgccttggttaaaaacatagtgagtctttaaaagcaccttaaaaataaattttcaaacaacctttaaaaacttacatctaattttgtaggcatctaaagagtctgagcctcaggaatattaatatcccttttcccctgcacaaagatgctaagggccctttgaaataccattacttacattagagaaacaactatttaagcctacctaatgtaataagtatttgattccactggcccatagagtttaggagaaccagaattggttaggtggtcagtcatttaagtatcttgccatttgggttattttagccaaaggaaaaaaacaaattactttgagttgataatgaccttggaaaaaatttagccaatggtggatgttatttatagttttaaatagaatttcctataccaggtattccttgttcccaccggcttatcatcacctgaattgccttccttaattataagcccatcggcttatattgcccaaattggctttttactcatgggcatgcattgcctgtgagaacaatgtttttaagccccagacccatcccttaagagccactgcttgttagttatgagcagttgaactaaacctgcttcagcttggttgtgatgctacagacatggttcttaactagttatttacaaatcatgttctgaggactatcaggcccatgaataaaagagaagtaaatgtgaaatacggagttttagtcctcacttagagattcaccatacacagcagaggattgcaggccctcagaagtctcagaggtaaagagacatgtttaacaagatttaaagttgcttttcccaaacttatttggtgatgggatgctttttattgtaccatttattagtaggttttagaactagtatcccttggttggaagaagaaacagaaaaggaatactctcctgtattttatcctgcacactcccacactgagaagggtgaactcacaataactttgcagagcaggatggacggtggatgaatgcttatacttacatagggttgctgcatctggggccagtttatttatggggtttaaaatgagttcacacatcattagaaactcagggcagtttgcaggtgagaacactgagacctgcttttaaaaccttccttattgggagagagttcagtggatgccatataaagtcattctctctttcaagcctctttgaagtgtgaaaatcagcatctgccactactttacactaatttcatgtttgtgaaaaaggagatacaggctgttggttttgtgcaaataaatgaaaactgcccaaatgagaacaaacagtggttacttattcaaaggtaactataacaagggtggccattatcacttgtgtttggcaggctcaaaggcgggcaggggatgggaaacccccctttataggttagaaaaagagaatacttcaagcatgctctgattggaggttgttggcctagagaagctggacatggctaactagaagtggggcaccttaagtgattgtattagggaatacatttggccttccctggttggtcccaagttggaagcagaggtaaaaaatagggacgctgacagtcactgaccaagtcctgaccattctgagtcaattgctgcagagactgtgttttggttgcctaggctagcttctgcagaggttttacatcagaattctatcattatatatgatctggccattgtctatttgtatactgattttctcagcttataatgtggactttgatgcttgagaaaatatcaatctaattaaacctactgacccttggaaaatttagagtgagtgctatgcctgctctgggttacttctggagaatggcagtaatcatgcattctatttttattcaaatgctcacatagaatacactgagtcaggtaaaagcacacgttttatcacaactacgggatctggttagatggtcggctttttaatttcatggccgctcactgccactacagcagccgtcggcaagtctacaaggtctgttttgaattcgaaattgaaagtatggcaaaccaaacaggcctgatattgacattttggagcaagctgcttacctctctgcatgtcagtgatgtgctttgctttgccttctctctttattttcttagatatctattaaagcctttgcatttatccaagaatcataatatgtacatccaaactgtcaacccaaaaatctggtctgaagtgacgactcagtttcagttgagggaagaggcaatcctgccctcccacaatgggttaggccttttttgtgttgctataaagaaatacccaagactggataatttagaaagaaaagaggtttgtctcatggttctgcaggctttacaggaagcagggtgccagcatctgcttctgatgaggaactcaggaagcttacaatcatggcgggagaggaagggggagtatgcaactcacatggccagactagaagcaagactagaagcaacgtgtcacacacttttaaacaaccagatctcatatgagctcactcatcactaagaagatggcactaaaccattcatgaaggatacatccctgcaatccaatcacctctcaccaggccccacctccaacattagggattacatttcaacataagatttgaagggggcgtctgaggtatatcctctacccccaccagtaaaaatctacaagaatagtccccaaatcttgaatgaatgaaaacaaatggaaaagaggcatcaaataggaaatcaggaaagtatcaaatcatgggtcattttaatgtgtctcagagatttaggtttaatgaatatttaactttttttttttttctggtgacagttgaaatgaatagtcaggttgacaaggtaaatgacccaacagagagtcaacaagaagatcaactaataggtaagatgccccttgtggtgagattttcaatgatcaaccagccataagaactatttgcaaatgacatactggatttcccttggttttgccaagtccccacagcatggcttgggataaaccttgaaaatctttaaaccaaataacacagcgtaaggggaaacgatcacccctagaagcttgccatcttgaagaggaaaagatgagctacagcacattcaaatcatgtataccctggttttctgtgctttgacaagtaaaaaatgtctccatccatctcaccccctggcctcctggagtggtcaaattatttcagaaactccaagctgattctgaagcattgcttttctagaagctacctgctgagttgcttggtatatctgtctttaagcataacactcaatctttgccctggagtttgtataaaggaatatgagtgtgtttggacagaaacaagcctgccttaggtcctgtttttttcacaccactacctgtggacccgtgcgtctgcacaaaggtttgttatgttgaatgagcttcagggaactcccaggaaaataaaaagcctgggtttgttacgttgaatgagcttcagggaactcccaggaaaataaaaagcctggtccagatcatgtttaggagtttttccagaccaacattctaaatctctcagtagagactaaaatatatttagaatgatgagtgtaactgagtccaaagccagtactgcttgcttcatggcagccaatacatcaagagacaacgtgttgaggcaaggaaaatgactttattccaagagccagcaaaccaagaagatggcaaattaatgtcctaaagaatcaccctaaatttatagaattttaggctccttttctctttgaggaaaaggaacagagaggtggttgagatcaagaggtgacagacatctggactgcagcaagggttcaagggggagttgtgaaacgtctttgcccttggtcaggtcacattgctcctataaatctttaacataatgttgttacttgtgtgcatactgtctttatctcttcggtggttagttttgggaaggaactattgtcatctttgctttaaagttgaactataaagtaaattcctgccgtagttagctcaccctgcatgaagagatgagcaaaagcaatcaacctaaaagatatcactggacgggggcagcggggagcaaaatggagctagtcatgctaagcctcctttacactgctacctgagtggtctataatcctcttccataccctgagggctgatgagaagaattagaagaaggaaattatgcttgatgttataactgttccaagttctggtttaaaatatttagttgttaaaaaaaaaagaaaaaaacctatggaataaatgaatcatgggtcatctagtgtaaggcacaaataatgtgttgacacccttgccccctgtacctccttgcactcactgcatgttcttgatggttctctacactttcctaagaggcttggctttaccactcttgtgctccagcatcatggaagaataaaatatgggaatgtgtgaaagagtacatgtcttattcctgtatggtcttgaatatcctataaaactaaatgtaatggtatctgtgtaatgcatgtatagcataagactgctaaaaagtataagctcatacaaacatgttcttataaacatttctcctttttttttttactttctttatatatttaaaataccctgctaagctgcagaaatgatacggttgaggagtttccattaaaaagtaatgaaatgagactaaacttgaacaatttaaatgcaagctcctcagtgtttcctttccttttacccttttgctgccaataaactataggcttcttgtctagacttttttcttacagacattatttctttcctgtgtgaccagtgtccagatgaagtgccaggattagtctgtttttcttggttaatatcaaaatgatatttttcttgaaaataaaaatgaactcatatgttaacccaaatgaatcaggtgtcaaaactttttttttttttttttttttttgagacagagtctcactctgtcacccgggctacagtgtagtggcacgatcttggcttactgcaaacttcacctccctgtttcaagggattctcatgcctctgcctcctgagtagctgggattacagtcgcgtaccaccacaactggctaattttttgtatttttaatagagatagggtttcaccatgttggccaggctggtcttgaattcctgatctcaagtgatctacttgcctcggcctcccaaagtgctgggattaaaggccaggtatcaaaacttaaagtccaaaattagtttaaggaaactaaattccaggaaggagaagtgacatgcacagggtcacctggctaataaatggaaatttaaatactccaattcaaaattctgctccctaagcaatagcaagtttctggacacagttgtcacagaggcagaatgaatgatttgtgcaacgtcactgactcccacagcaatatttacacagaagggtttgttaagatgatctggtcgtttgacagaaagaaggaacccttgctccatgaatcataccttcaaggaaattaaagaaatacagtgaaatagaattagagagctcaaagacataatacaagaatgtttggcgttgtataatttgtaattgtaaaaaatcagggatagcataaggatacaacagggagagggttaaatgcatcagtggaacactttccaaatgtaaatgttttccaacaagtatttgagggcagtaatgatggttatggaatctgaacctttggttctggagaaacatggcagactgagtgtggcttctaggttgagctttaagaggcttgtaacttccgtttttgcactctcgtaatgctcgttgcctggaatccagacaccttggaagaagcccaggttatcctatagaatgaaggaggtcacatggagaaaagtcctagaaaatgagaatccctttcagatgttctggccccagcaggtaccaccctcaagcagatgaactgtcctgctcagtccaggccagatggtaaaatcatgagaaatagtgaatcactcatgttataagccactaaatttggggctttagattgttgatacagagacaggccttatggccacagtcttgcattttaatgcccaccttggaccttgaaccattcaacgtaaggagttggaactgatacctctgcataaataaatctaggacttctagctcaagaaattaatagaaagacttggatctgcgccaggtactgcatggggagagaaaaaggctcccaagatagatagaaaccgcaaatacactgtgagtttgaaacataattttatgtgatccaaagtcatgcagtaataaacaaattgaaaaatgaacttaataattgattacagaccagtgtgattcctggtgtatgtggcaaatggaaatatgaaactaccccatggaatttctgcaaaagaaaaacaaattctgaagttgaattcatagttttaagacttacagaacacacaaggaaatgatccattttgagtgagagtcagtaggtaaaattacaggacaattagcactatgagaacgttaagagagtaggaaattttgaagattttataaaataactacatttgaatgacaaaacaaataaaagcagacctaaaacaataagaaaagagcaacactaaataattaacgacaatagaaaaaacaaattaaaatgtagtagtatcaaagacacgtgaagagacatgaaggagaagaagagaataaccaagacatgttaagttcaataagagttctacaaggagactaggcagtgtagggctgtgtatttgattgatacccaccaagcatctccaggtttaacttaatttggactgagattactgaaaaccagggaccgcagatataaaatacagaaccacaaggaaatcccaccacgatcccactagtattgaattataaagttaacaccaccaaatgttacagaggatgtggaggagctagaactcttatacatggctgggggacatataaaatggttcagccacttttaaaaaattgttagtttcttgtaaagtatgtatccatcctatggccccacaattctgttcccgagtatttgagagaaatgaaaacctatattcacaaaagccttgtacaagaatacacatagcagatatgctcacaaaagccccaaacttgacacaacacaaatgtctcgcagcaagaaaatgaactttaaaaagtgacatatacatacatgggaattctagttagcaatgaagaggaacagattactgttaacaaagcagcaacatgaatgaatctcagaagcattacactgagtgaaaggagacagacacaatgaggtacttgtatgattccattagcagggagtcctagggcagaaaaaaactaatttatggagatagaaatcagatcatttgttcattccagcaggagtggggtagtagggaagggaactttccagggtgatgtcatgtatatcttcttggtggtgtgggtttaatgtatgcatttttcaaaacagattgaaatgtatgcttaagatctgtgtgttttcctgtaggcagattatacctcaattttaaaaatctaaaaaaaataaagagtataggtttttgcaaggcacagtgtcttcttagtgtcctctcatgggtagtgaataaggcagataatttaataagtacaatctgaagtggtggcataaccatcaatgacttttgcaaagcagcattatgaaaattgttattatttatatgctgatccctggaaactagagtgtgagcatgggcctgaaaagggaagccacatcaactcagggttacagttttcaacgaatactttgaagaattgagttaatcgtccccatcagccaaagctcgttgtcaatgtggcatacatttattaacagtgatttatatgctctttaaagataccatgtgccagcaattacagttcagacatctaaagctctttgatagtcaaataagatatttctgggcctatgtgaggggtgagagacatttaaatggctgtattaaaaatgtattccttgctaagcctgtgaagatgtcttatctttaatctaacaaatggcttctctttgtcttcagcaggggcacaagatgaagcgaaggaacaaagaaatggaactaaatgacaatcctcagcatcgcaaggcctctcctggctctgggggagctcgggaagatagcagcacacgctgtggaggagggtgggggtggggggaaggcaagtcccatggaaggacggggaatcctttactctaatttctccagctgcattttgttccgtttatctgcagaaaaagaaagaaaaaaaagaaaaaaaaagtttcctttaatttggtggagggacccatgttgacgcatctttcaggcattatccttgtaatttctgtcttttctcttacaactttgccccagggtcacagtggcttgattgaacactcacatgtgtatcctggcccctgtctgctttcttggttatttcacaaagctggtcacacagtggtttattcaaaggaaggggaggaagacagtggtttgataagctgcaggataaattttaggaatcaatgagcccagcagcagtataatccccagacagaggaggcaggatagaaaatgggcaaaagcctcggaaaccacttggaaaaggtctggacaatgaggtgaaaatattttcttcagggttcccaaggcacaatttgttccaagtggctaatgagaaatatggaagctgaattttttccagagcagagtgcagaggcataacagaagggtgggccctggcagccatctgggtctcttccttcctaaccatggtggcaggtgcatccttctttgacactgactttcagcagagcttacttggttcatgaggtcttcacatggagactaccagcaagaggtgactctctgctgcataactgtaaaggatggccctttgctaggtgttacagttaaaagctaagaaaaggggcagtgcatttaggacccaaacatatgcctatgaatatcaaaagctcctcctgaaattgctgtgagttttccataaaagaatatcctgtcttcacccaaggcttgacagcccacagagtggtctcatttgaaattacaggaaattagagcttttgcttgcagttctgccttcctggcctgtgtttaaatgctgtcacttgtttatgccaagttcaaggctgattcaatggttggtcccctcacccagaaaaccctgaaggggaggatacagctctgaaggggggcagcagtactaaaaacccaagatgccagtggtatagtgggcacaagggatggcgaccatgaggatgccaggcatcatcaccaatatctatcctagagccagtataaggccagatgcctacttcccacagcctccccgggttccaaagtcatgtcattgttttcagtggaaacatatcgtttgttgcatatcttcttaaatccatcttccttgtaagggctttagaactaaaacttacttatattgtttttccttaacagagggagaaaaatagtggattattatttctaaaataaaaggatgttctgctttctaaatatcccatcaaaatcttcagttttgcacttttttgatggaaaattcatcttatcttcctatgactttggttttagcctttctgaatttgttaccccttctggatggcttatttgatatactggaatagttaacaagctatacttcagcatatgcactatattctaacaaattttttttaataaaatcaagacatcagcaagaatgacatttacgtgacctcataatgtgggattatggccttctgttgctattccagtttgatatggaagcatctatatcctctattgccgttagatgttgttgcttttcagaaaagtaacgaaaaggctcattttaaagaatccaagaaacgatgtcatccaaatattgacagtttctacatttcatgccatctttataactcaattgaaagttgccgtcattcttgtgaagtatttgacaagtgcaatctgctagaagctcgtttttcttgtgactcccaaatgttagtgctacttagcctcagtaatgagttacagttgaaaaaaacatgagggaaacagagggacagagattttctaatgaacaatgatggaagagacctaatgtccttgctagaaacagccaggatggaaattatccagccctggcattctccttatcatcaatgacagtcattttattcatttatttcaaatgtgggtgggctagaagtggaaggagggaattctctctgcctaaaaattctagaagaatgaaagtaatctttgtatccaggaaactaagagaatgaggaataaatatcttcagcccgactcctgaatttgtttattcttccatctataattagattgtgttttcatttttgctttgtcatgctttttggttgttatttggctatacagttttatgctttaaaacaaatgataaagttaatttccaattcaatagtgaaatattaacaatctaactatagccagatcaaagacacctgaacacagaaaacctttatttgctggtgctgccattgcacaggctgtacaatgaaatagatttgaaaagctgattgattttcccgcacataaattctggatgtcaatttccaaccaaactccaatacagctatgtggcatgaagagttacaggagggagggaggaaaatagccctatgttagtcatgtttgcatacagaggatcaaagtaggccttcaccataatagttctaattaaaatggtcctcgctgtaggagagacaaaggggcttttcctctagctggtaactattcagatgatggacaagtcttctttcataaaagattacaaagaaggcatccgaatcactgtctgtgatactgggtcacatattaatcactgcagctaattgtaaatctttctatgaaacactgaaaagcctctttgtgaattaatacagttctgcttgatgcacttgatttgaaaagacatttctctgtatgtggcgcatgtcggctttgctttgaaaaataacaaagttagcagaatatgttcaatatattttcttggggaatagggtttttattacatgattcattaaggatttgccttaccctgacatttgtgatataaaggaaaatcagaaaaaaagtaattttcttgatcaagatatgtttttacttaatgcaaataaatgtagtctgttgcttgcaaggaaaaaaaaatggcttctgatatctggtataaactgctaaataggataatacgtgcctcttttgttaaaccggcatttaaatgctggactgcttctaaatctgtttgtttcttttcatctgtgccatacactaaaaaacaactgttgccttcatactatatttgttagagcagaatacaaataaaatttgtttgagaggataatgtgaaattatctgtgttttgtgaaatttgttctttagccacaagcaatgagtaactaaaactactcacttaatactatttgactgcaaatatatatatttaaaattattcctgtaagtcagctttaacttactgatagttttcccttactaagactggtcagcgtgttggccgtgtttttcaaattttaaactatagagtagttttgtatagctgcaaatcccagtgtctaaattttctctgaatactagataattacttaccctagcatcagcctctgaaatgcaagttataagttgttgagataaagccaacggtcctgtgaacattggtctatctttcagaacccatgaccatggctggaatttttagtgagcaccttttatgatacagtcactacgctgacactacaatcatggcagcagtgattctcggtctactgttggtggaattgacagaattacggaattgttaagagcttagcagtaggccaccaaaaaatcgctacaggaaaaactcagtgttcttttgaaaatggaatacgcttgccaccaaatttagctcccttcatctcctacagaaggtatcagcattattatttgaggaggcaatacagaaagccaacccctttgtcaaacaaagccagatacttaatagtttaaggataataaggttttccaaactgctgtaccactgaagtgtttttcccataataaacaaggttggatgagacaaaaattatagataggacagtcttatgctgcaatgggcaaccgcaacacaaatgcttcagaatagcagtgaagataacgtgaaatggccaggtgcagtagctcacgcctgtaatcccagcactttggggggccgaggcaggcggatcacctgaggtcaggagtttgagaccagcctagccaacatggtgaaaccccatctctactaaaaatacaaaaatcagccaggcatggtggcaggtgcctgtaatcccagctactcgggagaatcgcttgaacccaggagatgaaggttgcagtgagctgagatcatgccactgcactccagcctgggtgacagagagagactccatctcaaaaaccaaaccaaacaaaaaaaaaaaaaaaagaaaaaaaaacataatgtgacatgaatctagccctgctagatgcagtttttcatctctaaccaattttcatatcttggcctggccctcttgtgtttctcccccaacattcccaacatttctgcccctgtgccttgcattgaccaaaggtgccaacaaagattgcttaagtgtactggtggttctcggggctgaaaggggtaatggtatcaatttaagttgttctcgccaagactggcccagctgtggggttttgagaacgaaactgcctcagtttctttgtttagaagatgtaaatactaatacgtgcctgaactctcttacaaatgtaaacatgaataaaatgccaaaatatgatactttaacgtttggaaaagcacttggtaaattattagcatcagattatgctatttggtgctgttggcaaatggtcctttctctagctgaggctgctccaccaaaagaagaaatgatttttacaattagtaaatatgaaattttattctactgaagttgatttaaactttgccctcaaattaaggacccgtgaggttaagagaaattgttttgctataatttagagaagtgggaaatttgaggtcttaaaattaaaacatctacacactgacaaaaatactgatggcgtgaatttttaaagtcatcttttctctgataataaccagcgtatctgtaaagaaaaaaggcagtacacttctctctacttcttggttcacatgtatagaaggacatagatttgcaaggagataactataccaatatgcacttcccttccccagggaggattatacttcctcatcttactgaaattggatatggctgtgtaatttcctttgttcaatatataggcagaaatggcatgtgtcacatcaggcagaagcatgaagactcacgctctattctttccccatggtaataaccagcaatatcccagacaggctgacctgtcaccatagatccgggagtgaagacatagtggagtttcaggcaaccccagtgagaaggtgtcatgactgagaaatcaaactgtgttttgaaatttgggggtcatttgttaccctatggtaacctgtcctatactaactgatacataggccatcaacatttaagtaaaaacggtaagaatctaaattatcctcttttccaacctcttctttggtgactctcaacttggtttaagatgctgccagcatattggccttctgtccactgctacaacacgccaggttccttccatccttaaggcctctaaacttgaaagctctttcttcccattctcatgggtctggtaccttgtcatccctgagatctcagctgtaatgtcactttctagacatgccgtccctaatggcccagttgaaaatagatcccttttccctacttgtgtttgcctatctaactcctgtttgctacttcagaacacctacaataattttgtaattgtttatttgtttatagggcagagataaaaattatatgtcacaactcagatgtataaaataacgtagctgctctccaacccctgacacccccaccaaaaaacaaacaaacaaacaaacaaaaaaaaacccaagcttatcttgtttccaagctctattcaaatggtcacaggggattgtggtaaaataatttaaatttgtcaagtaaagttatctagtcatttccagtataaaatgctttggaataaagatttggtcagattcaaggtttaaactccacactaatgctatttcttgccacctaaattttgtgcccttctcatagataaaggcctttctttctttctttctttcttctttctctctttctttctctttctttctttctttctttctttctttctttctttctttctttctttttctttctttctttctcttatttcctttctttctttcttttttttttttgatacagagacttgctctgttgcccgggctggagtccagtggtgtgatctcaactcactgcaacctctgcctcccaggttcaagtgatttgcctgcctcagcctcctgagtagctgagtttacaagtgcccgccaccacatccagctaatttttgtatttttagtagagatgggctttcaccacgttggccaggctggtctagaagtcctgacctcgtgatccactcgcctcggcctcccaaagtgctgggattacaggcttgagccaccacgccctgccaaggccttattttttaatcaccatgcaataaaactgccaataaatattaaaatagtagttactataatattttaaaagtaattctctaaatgttttctcaaagagggtatcaagaataaaatgatgtattatttagaaagtaacaaaaccaagaacactgctacggtctgaatgttggtgacccccaccctgcctcaaaatttatatgttggaacctaataaatacccatgtgatactactatgaggtgggacctataagaagtgattaagtcttgagggctctcctttcacgaatggaattagtgtccttataaaagagatagagaggaaccgccttgcccctggtgccatgtgagaacacagcaacaaagtgccatctaggaagcaaagagccctcaccaggcggacaacctgctagcaccttgattttggacttccagcctccagaactgtgagtaataaatttctgttgctggcatattacccagtctaaggttccttgttacagtagcctgaacaaactacaacaaacactattaaaaacgtgagatgaatccaaagcactatttagaagaaaatttagttttaaatgctctaattgtgtattacagcattttttgcattaaaaataaaaaagaaaatagtattaaaagcattcaaattaagattttcgaaacaaaaaaaatccaaagaaaatgaggattttatatatatgtatacacacacatatatgtacataaaactgagaaattttaaaagcagtaaactattaaaatcaaactaaatctgggttctttgaaagtcaattgaaatagataaataatctgtaactcttatgagtaatttttaaaggatagcaacatagaaattaaattttgaggatgataatattaaattttatgcataactaaccaataacaagtcaaagaaattggagattttttaagataaaatttaccaagatcaatataacatgaggcagaaaatccacaaaaaatttcatagcagaaatgagaaaagatatcaaaaagccacccaggctaactatatctatctatctacccatatatcaattgatcgttcaatcgatcaatctagctaagaattatgtgccaattgtcaaaaacttaagaacaatcacagataatatgcttgatttgtttccatttcatattattttataattgaatcatactgtatatcatttatgtatactactttttcacatggttgtaccacaaacattttcttgtcaattaaggattttcccaagtcatttaaaaatatttcctcatatggctgtaatttttacttccacttccctattctgtgatacttagtttccttgattttttttttttattttgaatgaaatgacgaataacacttttggtcacaaatttttgtttacatcagggtatatttccaaaaggggattttcagggttcacaaacacttgatatttattatcgaattactttgcaaagtcaaactgctagcaattaaacgtgagaatttccattttgtagaacactcactggccttgaggggcctataaatatggacattaaaacatgtcagcatgagaaacgtttgtcattattatttagcattttttgtttactaaggtgggtaaacaaatttctatctgctatttttatttcctgattaaggaattagtctgttcatgttctttggtcatttgtcagttgagattttaaattttcattgatattcatgtgcactttatatactgagactattatctttttgtcatatttcctgcatataattttctacttgtgctttgctttataattttgattgtgatattttctgacacacagccttctttttatgtttgtacacaatcaagtctctccctttgtgctggctttcatcacttttggagttgacattgatggtttttgactactaatcatccagtcctgctgcttctggggatgaagcccttcagcctaggagaaaactcttcttatgcaatttctggagctgtccttccactcctactctctgtccagacaggcacacataggacccaggctggacaatcacaggactttatctccctgttttcagtgactgattagagagaacatgtgaccgaaactgcgcccctcgatgtcttccccaacactttgatttggggagcctttgttctgactcaggaatgtgagccattgaactccccttttaagcaagtttgagttaggtttctgtctcatgtgactgaatggctctccaaatctcccaaagaacaaaagtcttacagtgtcttacgggctccctgtgatgtcatggtgccctcctccctcatacctctacaaactcatcctctgctattctcccctatgggcttctctactccagccacagtgacctcctgaaatatgccaggcacatttcttgccttaaagctttgcactagcccttctagaattttcctcttgtatatatgcatatacatatatggctactttgcttacctccttggagtcttctcaaagctttctcagtgagatctgccatcaccaccctctttaattctgcaaacaacccccaactgaggccgtcctcactggctctacttttttccttttccatggcacttacataatttacctattattaaattcatttcaaagaaaaccgtattgaaaatctcccactgcttgatgaggaaaaggtagtccctatgaggacagagatttttatctgttttgctcgctgaagcaccagaacagtccctgaaacatattaggttcccatttagtgtttactgaataaatgaaagaattccactgactactgtgttctgggaaacacttggcaaaaccccttttatgagactggtgacccctggctaaggtctcttgcttttctctttggagaaaaatgtagaggagagatgaaattcaactctgattattatggaagttaataggaggctctgcaccctgtcccagaagaaaaatattaataaagaatgatgaaagagcaagcaatgtttgcaatattattgcaaaaactcccttttggttcataaattatgcctactccatatttaattcaaaaaagggggaatctgttcattgatccttcctcaaactgagcaagggattggattttgttttgatgttaccacgttccatctttttatctgagagttgatgatgacaagaactgtttagctagggttggccaggctaccttgggaagacaatgacatctctatggctgaacacaatgaaggttgacttgcaacacactccttgtgagttgagcagctttcctacaggcttccatcctgtggtgctgttaccttcaatgtgtggccttcaaggtcaccatggaacaagaagagagaatggagattgttatcagccagatacaggaaacattgtacatctccactgcccacatttcactggtcataactcagtcaactggcccaacttgatctcctggaaaatgcagtttgcccaagcacctaggaaaacacatatgtttggttattacctagcattgcgtctaccttccctcctttgagtcatagctgtgggctgtggaccagccctcaattttcattccccaagaccatgtcagccacagtggcttagggaagaagtaccacctggatatcttagatgctcgtagcaatctcacactgggcaaagagcttaatagtagagtggaaaaacctgaatggtgctgtatgttgcctcggacagaaagttgaggatgtagtaagataagcttttgcctggccttgttgtcctagaactgactttttatttgttcttaagaacaccaaaagaaaacatggtccaggggaggtgtgtgtgtctaatttttctaagtcctaaaatgtgcagattttgaacttcaaaagtctttccctgtccagagataggcaaatgttccaccagatattcacctatattttcctttattgtttagaaattctttgtgtttgggtgtgtgattccattttttacacctatatctttaaggcactttgaatttatttcagtagttgatatttagaagggaatgacttggttgagtagctttaaaactaatcctagcaccggctgggtgcagtggctcacacctgtaatcctagcaatttgggaggccgagatgggcggatcacctgaggtcaggagttcaagatcggcctgaccaatatggtgaaaccccatctctactaaaaatacaaaaaattatccaggtgtggtggctcatgcctgtagtcccagctactcaggaggctaaggcaggagaatcatttgaacctaggaggtggaggttgcaatgagcagagatcacaccactgtactccagcctgggccacagagcaagacttctcaaaaaaaaaaaaaaaaaaaaaaaaaaccaaccaaacaaacaaaaaactagttctagcactaattatgaaataatacatccagatctttttgctccaagtttatttctttaacttatacttattttacatttatacaaggatctattttcttggcaacatcttcctttggtttctctagtgctattctgttttaattagtgtaattttagaatatgtgctgatgtttattaaggcaaactcaatacctactcttctttgctttcaaatgttcttggctatcacttattgtttagtggtccagacaaatcttaaattaacctaatcacctttccctcctacagtccccgttttctaattctccctctctcagtatcctcagaaaaatgaataaaccagtcagtttagccagcccatgcttagtttaaagtgggatggcatctgttataaatgcagcttcctgagatgttccagagaacaacatttctgttcatctctggtctactgacaaggctgggctgtggtatgaataatgattggtttctgaatattctgttacaaagccttttcctgactgtcttggcctctggtctcatcaatctcgtctaagccgtttggttctgcatagtgagtcaggaggcaaaagctaggtaaatatcactgtgtcttgagtgatcaccctctttaagtaaccatccgctttgtaaacaaatgctgaaggactcagccgagctggtctacaggactctcaatctgcaggcacgggaatacagcatttggttacacagggcatagatctcggttattcttgaagaaaactgaaacaagttcagcctagactcgttagcagcctggccttgcaaagacttacacactgcaacctcagagatgctgagcctctttaaatgatccaggccagggggtaaaaagtactgttttttttttttttttagtttttggtgaacagaaagcatcataattatagacagagaatgtataaatagctaatgtgaaatagctcttttcattgtttaaatagcttcatatataattcatttaatcttaacaaaaatgatgtaggtactatgattatcccactatacagataagcaaactgagacaccaagagacaaagtaatttgcaacaagcccacccagccagtaagcagcagggatgtcatttgaacaggaagtttggagccaaagattactatcctaaccactatactaaaggctctcaaacttgggtcagcatcagaatcacctagaggccttgatcaatcacagatcctggaccccaacctagagtttctcattcaggaggtcatgggtaaaaagctgggattttgcacttctaacaacttccaggtgctgccacttctgctgctgcccagggaccacactgcgaaccactgaaatggttggcaggtgtggtcccatgaaggcgaagcaggatgaacagaccgggacaatgactaagccctgcagctaactctcagtctctaaaatcagaatatctgtattctcctagtccctaaagcaacccaaagctggcattgcctgcatggtgccagcttcctcttatttccattaggtttataggcagctatcaaaataggagacagtattaagaccactggctgcagcatcaaaacatctgggtttaaatctcagctccatagtttaccagctgacttaacctctccaagactctgctgtcacatctctaaaatactgatgatcattatttatcacttacgattttaataaaggtaaattttatacacacacacattgcttagcatacagaaaaaatgatggttaattatttttatgagaaagaggtatctgattcccttccttcctctcaaataccagcagaggtatttatctttgagaaggcactgcagaaagacttgtcagggtcacgtggggcactcaaactttctttacagctataactgtgacaaggataaaagagaaaatacacatacttgacaacctgctcccacccgatcctcatctctgaggccattttactgtgtgcagaagaaacagaggaattggaaaaatgggaagtccccaaaggaggcgtgcaattaacacaaagggaagccgggcaactggtaaaaaagagagatcacttgaaatcattttagtcagcgttatgaatgaaatatcctctccagcaattattgaactttaaaaaattccttctagctacaatttctttcatttatttaacaaatatatattgagtccctgttttgtatcagccactcccctgggttctggagatgtagggataaacaaaacaggctgattccctccacatggagcaggggagggtgatgtgaggatgtaggggaggaattgagccagaccagggggtaaagacctgaaagaaacggggatatagcagcatggtctcctgaaagaggagcatctggcagtggcaactgcaagagcaaatacctggaggctgactcgtgcccacttcccagaactgccgggtgagtgagtgggaagtggtgaggacagaggggtagagcagagaccacctcccatcatggaaagccttgtaggaagataggttgccactcacaggattttaaacggaggagaaaaatgatccaactttgaaagtgactccatgtcagtgttgcatgagggagctgggctgacattaattgaggtctctaatttgggacctggatatagaggtggaaagagagaaaaagagaataaaaaacagaggtgcaggaaaaagacctggggagggaccaaacccgagatgaatccaggttctgtcgaccgttactctcttctccagcctctaccacagttttcacatgaccctaaagggtaatttgctaagtataatggcctcgtccccactacattggatcagagtcctcaatcttaactgcacattacaatcatccagggagttttcgattctattctgcccaaaagcaaattaaaggacattctacaaaatcaacgaccagtactcttacaaggtgtcaaagtcatgaaagacaaagattgcagaactgtcccagattaaaggaggagaacaagacaggacaactaaatgcaatgtgagatgctggcaaaaagcatgagtgcagcaattggcaaaatctgaataagctctgtggaacacgtcactacatgcaatgtggttttttattttgattatagaactgtggctatgcacattatgaacacatgggaaagctgggtgaaggatgcatagtaattctttgtactcctttgtatcttttctgaaagtctaaattatttcacaataaaatgtgaaaaaaataccactgctcaggccacactccagacccaatacatcaagagattgaggtctgaggtacaggcacttttaaaaagctctctagatgattctgaagtgcaaccatgtttgaaaatcaccatcttaaagttttaaagctttcagggggctttgcctgaaagttttcttctgcccagggcaaaatgtccgtggggcacaccaaggccctctcttctgttgctgtgtcagctcctcccagtttgcctccctaggcccaaaaggaacctcttgtaggtagcatcagatatgaggccagaaggagggggaatgtaatcatgcagtcacaagagatgcatcctttgagactctagcggaatctgagtcttcctcctggaggagatctgcactaagctagctagctatagttcccaagtccttctctgcctctttgggaaacggagagagatcagagggtctcttaaaatcacctccagccttggaccagtgttcacctccactgtcggctttgggatgtttctttttccaacaattttatcttattgctacagagtaggatgctcccttccctgtagaaattgggaaatgctaaatacctatgtctcccaggaaattcagctgtaagaaaatgaggcttaatctgttttgattaacaaggaggcagcaaaaggctgaccatgcactggaggatgcaggaggaaaaacaaaagagaggtagaaatgtgcccagaaaagcaaagggaaaaatcagggaaggttaagcaacagaaaaagatctctggattccgattcaattttagtgattgcaaaaacaaggctcttggctatttgcatataaatgtgctgggggcaggggagccacagtactcagctgtgcattctaactttctccttaaaaatctgttcccaaagcagctgcagaaatcagctgcaaattccaaatctaaaaatgaaagtcacatggttgaacttgggaggaggagaggagaggagggaggaagggcaccacatgatgctccaattaacccattggggcctggagcccatatgcattgcctgggagctttaaacacccagataattaagctgcaccctagagcaattaaatcagaatctctgggggttgggtccaggcatcagcgtgtctggaaatttcccaggcaatttgaatcaacaaccttaattgactctagagcaggggtcagtctgcaaactgtttctgcaaaaagccaggtaagtaaatatgttaggctttgtgggcttttcagcctctgttgcaaccactcaactctgccattgttcagccatagataacactagtggatgtggcttaggcaatgcatgtatttataaaaatagtttgcagcccctacgctaggcccttgttatccaaagtgtggtccttggactggcagcaacaacatttcatgggagcttgttagaaataactaagctccaaacccaccccagaactctcctgagtcagtctgtttttaacaaggtgccaagatgaccacagcacattgaggtcagagaagcagccataaggtgagtgacactgagaggtgaccagctgtgggaaccccagagagcttggctgtcttggagcaccaattcctttgtctataaaactatccttagtactccgggtggtccatgtatttaaggggtattttacctgtataaggactttgaaaggtacaaagtactgcaggaatgtgaattgttgataatggcagcaaaggccctggcttctcaccagtgagggaactgtcccttaagcaggtgctccgtcatcactcaggacaaggctgggaaggcctggccagcacaggctctcatctcagaggccaagacacttaaaggccagtctctgccaagcccaccattcacagcctcacaactgcagagcccaggggcaatgattgtgagtttaaagaactcagccttggaaaaggctggtgaggctgaatgccaccaacctgatttagtcactctaacatgtggcttctatccccaccccatgcagggaggtggcctgctagctatcgcatcccagtgcatggcacaggatcagagctcaaaaattattactgagtaaatagacacagaggatcagatgctgaatgtttggtggcatcagtctttaggtccggagtatctgtaattgactagtgaccttcatatatcagcatgcagaaggggccggaggtttttatttgttccaaatgaagtgtctctagttcctttgttgtacaaaactctgacaaatgacaacagaagctcttttcttttttttaatctgttgctaggggcagatggcctgagggtctgtgtcctggcccataagggttaatgggacttccaaaggcgcttcaagtacattgtgttttcctgaaagcctgggctgaggcattgagaaggaaggtaatgaactgaggagctctctccaagtgcccgtctgcaggtcagctgggactagcctgttgtcagaggatgtttgccatgtcctagaaaaatgctctccctgcaaagtcctgccagtgattagagcatgaaggaagtgtgtacacaccgcttcataaacccttgcacctgcctctgaggtgtctctgtggaatgcagttttgacacatcttgtgtagtggacttggagagaaggcacgaggggacattacaaagcacttgaggtctgggatgatgccctggaccctggacatccgcagccagaggagctaatgtggtatagagaactattcctcaaatctattgtgcagatgcttcacctgggaatcctattagactccagtccccgaggctgggctgagagtctgcatcgctaataagcaccaggtgctgctgctctgtggctcacccttggagtagcccaggcatagacttgtcattacaatatctggactagttctcttcctcagacttcccccaaaacatagggtgtagcaggtgtatcttccaaagatatctctgtcctcacaatgtgactttgactctcctcccattgcaaggtagggcctgcatgccctctttttaaattaggctgggcttccaataccaagaagtaatactgtgacttctaagggtaagtcataaaacgtgaggcagtttcctcatggttctcttgggacccagccaccatattgggaggaagcccaagcatcatccgtggagaggccatgggggccatttgccccttggccctgcagagctctcagctgacagccagcgtcaacctaccagccacataagtgagctgtatgtctaaaaactccccagatccatcttggaaggggattctctgtctcccatcaggttgcaccaactgaaagtatatggagtagcaatgtacccactgatccctgcccaaatggcaggtttatgagcaaaagaaatgatccttattccttttaacctcaaagtttgggggtatttttaaatgcaaccatagtgtttaaaacatagctttaactactccctgggtcttcttttcactctgtattttctttttgtacaatctgaccactcccactatttaaattattatctgcttggaccccccaccccgtcaagctacagagctgtatatctaattgcccaccagatattcccaatatacacaaatctttctcacctcctccatcctcttcccccctccactcccaaacaccttcctccaagtttatttggtgctgccatcaatttggttaattaagccaacatttcctgaccccaactccatcaggttggtattgccatcagattgacactctggtttctgttcatcgcattgccttctcatggatgttcactacctgggcttatacactcactgtctccatcctgagatgttccaattattcctgggtgcatctatcatttcttagacacacagtcactatcctccaggctattacctcagtgaccttagctctcccattcactgactccctgttgttttgagaatgaagtctaagaattgcatggaatacctctccttcgtggcttggttctagcctattgatcatatctagtgcccagcagtaactgccttgctctgagttgatgccttcgcagtctcaagcttcatagtcccctagatgcaccctgcccattcatctgtgtatatctttgtacatattttctctggctaaaattgtgcttctcatgagtcctcccatttgacttgtccttctaaacccaactcagacaccaccttgaccatgaagccctttctaaccctgggtcctctctctcgttatgtctgtacacagttctgttgtttgcccatattttactgcagctcgtctatttacttgactctctttgcttctagactagtgcttctcagaccaatagtatcagcattatcttggaaatctgtacaccgttctgctgtttgcccccattttactgcagctcacctatttacttgcctctctttgcttctagactagtgcttctcagaccaacatcatcaacatcatctgggaaatttttagaaaagcaaactcccaggccctgcctcagacctactgaatcagatgttctggggttggggcccaataacatgtgttttgacaagctctccaggaaagtctggtgcacactgagatatcagaaccactatcctggatcagttggatggaaattagaatcacctggcaagttttcaaaaatcccactccaactaagctggagttgctgggtttgggacccaggtctcagtatttttaaagctcccagtaaattccaatgtgtaatcacggttgagaaccttgctgttagatcgtttcttctgaaagtgtaatctccagaccagcagcttaaataagcatcagctgagaacttgttagacccacagacttgcagattccatcccagccatactgaattagaacctgcgctttaacaagattcccaggtgatttgactgcctgttgacatttgagaagcatagtcttgtacacctctgtataccagcccctagcaaagagcttggaacataacagccgcttgataaattctagagaaattttaataacaatgtctattctgattctcatggtcttgaagaataagatggaaacttatggtaacgtgctttgtaaacagctttataaatatgaggtactaatattaactgatatatgaattcattatgtcactcattccaaatattcaatgaatgcctactatttgacaagtatggttttagacacagaagatattgtagtaaacaggaaaggtcaagacttcaaagtctagtgggaaagacagatgttaaacacttaattacatcactagttaaaaatatacttttgatgaatgccacaaaagggaagtaagccatgttgtgagcacacattgcaaccacctccctgtgtctcagttgaggagttttacttctctgagctccctacaaggtgcagtgggaatataccagggaaaatcaatgattcaagtcaagagacttagaaagatttggatataagactttgaccaagtaaggtttctttcaaagcagagtctgagacaaggatgtgggtacagatagcttatgtgtgaggagatctcatgaaacagaaatgggtgaaaggaaaaaatggaacccaataaagggaacattagtgagaggctgggggtcaatactattggggacccttggggaaactgggtaagacatacttcatacttcagagtcatcccatgtgatgtccaggaagtagaagcgcatttatccaatgacttcaattcctcattgattgagggttcccaggggacatgaactctcctaaacatccaaattatatttctgagtagctgagctacctcactgaaatgtggttcttttttaaaaaagtaatttcaacttttattttaggtagggggtacatatgcttgtttgttacctgggtatattgtgtgttgctgaggtttgtgatatgattgaacccttcacccaggtactgagcatagcacacaatagttagttttctaacccttgccctccccacctcttcctgctcttgtagtccccagtatctattgttgccatctttatgtccatgaatcccagtgtttagcccccacttataagtgaaaacatgttatattttgttttctgttcctgcattaatttgcgtaggataatggcctccagatgcatccatgttgctgcaaaggacaggatttcattctttttaatggctgcatagtattccatggtatatatgtaccacattttcattatctaatccactgttgctggtgtctttttgggagaatgatttattttattttggatatatatctagtaatgggattgctgggtagaatactaattctgtcttaaactctttgagaaatctccaaactgctttccacagtgtctgaactaacttaccttctgccaacagtgtataaacattcccttttctctgcagcttcaccagcatctgttgttttctgactttttaatagccattctgactggtgtgagatggtatctcactatggttttgacttacatttctctaatgattagtgatgttgggtttttttttcatatgcttatggacacttatttgttttattttgagaagtgttcattcatgtaatttttaatggggttatttgtttttcacctgctcaattccctatagatactgcatattagacctttgtgagatgcacagttggtgaatattttctctcattctgtaggttgtctgtttactctgttgatagtttcttttgccatgcagaagctctttatcttaattaggtcccacttgtcagtttttgtttttgttgcagttggttttggggacttagtcataaattctttcccaaggctgatgttcagaatggtgtttcccaggttttctactagtattcctatagtttaaggtcttaaatttaaatctttattccatcttgagttaatttttgtatgtggcaaaaggtaggtgtgcagttttattcttctgcatgtggctagccagttgtcccgacaccatttattgaatatctccattggttattatcattttcattgactttgttaaagatcagatggctgtaagtgtgcagctttatttctgggttctctattctgttccactggtctatgtgtctgtttttgtaccagtaccatgctattttggttactgtagccttgtggtatagtttgaagtcagataatgtgatgcctctggctttgttctttttgcttaggattgcattggctattcaggctctttcttggttccacatgaatgttagaaagttctttatagttctgtgaaaaatgacatcggtagtttgatgggaatagcattaaatctgtagattgctttgggcagtgtgctcattttaattctattgattcttccaatccatgagcatggaatacttttccatttgtttgtgttaactataatttcttttagcagggttttgtggttcttcttgtagagatctttcacctccttggttagatatattcctaggtgtgtatgtatgtatgtatgtatatatgtatgtatgtatgtatgtataggcagctattgtaaatagagttgtgttcttgatttggctctcagcttgaatattattggtatatagaaatgctactgacttttgtacattgattttgtatcctgaaattttactgaagtcgtttattagttccaggagacttctggtggagtctttagggttttctaggtatagaatcatatagactgcgaagagagatcatttggcttcttttttttcctatttggatgccctttctttctcttacttgattgctctggctaagactttcagaaaagtggttctcaaactgtgattgccagaccaccaccagcagccacagcatcccctgggaacttgttagaaatgcagtcttgggtttcatctaagacctactgattcagaatacctgagggtggagcccagcaatctgtatttttaaaagctttccattgaattctgatgtccactgaattttgagaatcatttcaacttaagttttcaaactcttagaaaggccttaggcataaaagaagagttaccaggaattgaagtgtttagctgagactgtcctgagaggggcaacttcaggtgaactcagatgggtcatggggctatgggctagagtagcaaccacatccaccacagtctgcctgatttaacctcatgtaatctaggtttgtccattcacccacgcaagtatttattcagcctttacactttgtcaggtaccatacttagtgttcacagcctattaagaatgagacagagatgtcccttccctcatgaatttgtagtctaatggagaagacagtgtatgtgatctggtctgagaggtcaggacaggttccctgaaggtatccaaactttatcattcatctgaatcaccagtggattgtgttaaacagagagtcagttaaataggattggagcggtagtataggaatcatattttgagtagcaaggccctggaggacacttaagctgagatctgaagaataaccaatagatagccaggttaaagataggtagaccagctgttctcgtttgcttggcactaaggagtttcctgggatatagggtattaagtgctcaaaccggactggatggccacctgggaaaaagggtgaagggatgaggaggagtaagcctagggttcatgaaatccttgaggtgtgctatggtctgaatgtctgtatcccccaaaattcatatgttaaaatcctaacctcgaaggttctgttgtttataagccacccagtttatggtattttgttatagcatctttagctgaccaagaaaagttgagaaaagcatgctgtgttgtagaaatggaataagcaaataagactgggaagatgccagaaatagtgttaacatctggacatcaacagtctgctttagccaagcttatcagtcacttcggagcaatccacctgcagctgacaatttctatgctttatctccagctggatgtttcacgagggcctccatatggaagtccctaccacatggagatattgattgaccacttgaaatatggctagtgcaactgaggaattgaacttttaactgtatttaatcttaactataaatttaaatttaaattgccacatgtggctagtggctgctatattagacagtgtgggtacagagaacagattgattcaagataagcaaaagtggatgctagcataccagtgggacaactatttcaggacagaaatgatgttggtttgaataaggtgttggcagcaggaaacagagcaaaataataaacctggcttagacaggaagaaaacatgagggatgagagagaagaaggagttaaggataacatctaggtgcctggtttgagcaactggacatgtggcagagccatacaccatggagtgtcaggtttggaaacagcataaggaagagattgactttgaagtactcacaaaacattcaaggcagatgtagaatggaaagttccatgtgtaggtgaagagctcagaagaaaggtaaggtggacatctaatgtttgttctactagaaacagtcaccccctggccccaacctgctggtttaagtagggatgtcaatatcttcatgtagccctcactcctcctgagtcaaggaatgaggggaagacatgatgtgaactggaccacaggcccctaactaccacgatggcccaaggatgggcagctgacccaaatagaagttctcaaagctcttcccaaagcttgcagcttgaagtcagaaaaacagacactcagactcttaataattaatcaactaaatatatgggcatttccttcttatgaggcaccctactggactctgagggagtaatagaaatacatagacctttgccttaaaaagctcactgtcaatttggaggaagataaactgttaacaaaagttcaacagctataaaactggaggccactgcaacagatgacagacctgaaagtatagtggggtctttacgttactttctactatattctccacacccagtaagttgataaaactcgtcaactctgtgacaaaatacctgttaaattcattcctattttataacctgtaaaagtctgtttgtaattataaatgaacactatcacaatgaaaaaataaaaccaaacatttttaaatacccaaatcatcgaataagattaacagaaaatgccattcagtaaataaataaataagcaagcctaggagaaggattgctagtaaattgggtctttcctacttagatttttctctttcaactcaaagcctttaaaatacatggtaattaatcaaaaccttagtttgtgttaacatttttctagaaataagtccccatgttaaaaccctccagtggctcatatcacatttgagaataaactcaaaattccttgtaatggcttctaacatcatctattctcaccattttcctacctcatttcccaccactctccctctcatctttactttccacagtccacctacactggctgtttttgtttctagaatgacctcttcacttgataaaggattcttttcccagatattttctgttctcagcttaaaaagacacactcgctcactctctgtggaataaccctgatttattccccttcgtagtacatgacctatttaagcatgtgtccactgtttattttctgtcttcattaacagaatataatccctctggtagctgagacattgttctcaagagttcaaagtattcctggcacatggtagaccctctaagcaatagcggatgggcaggaggcaaagggttttatcttgagatgtctcttatcttttacatgggaagagtaaactccctaagagacttccctcatgcctcattggttcacattggatcatgtgttgatttctggaccaatccatgggaaaaagaaatagtattattgtgaatggatttgacctaccataactcattcctatggagaggctaggcttcctggaaatcaatggattatcactcactacctaaaaacaaagttataattctattagcaaggaagaaggagagatgaccattgggtaggcaaagagtagagttggccattgtgcaggatgtctcatttccatgttggagtcaaatctctttgagtctatgaagactatctttgcatatcaagcctatgcaaggttgtgttttctgcaaagcctttgtgatagttattgttatcaggtgtatgtgcatgagaacccttccttcatggccttctctggctccaattttcagggttttaaatcaggtaacttcattctgattctgacaactttcacgcttctctcttgatcaagatcttaactctgaagccattgctgattaatcattttgtagttaggttttaattgttcctcattgctggaatggacctgtcctggattgctggtctgatcccacatcagagggagtgattagtggctaggtatcagtgtaaaaacaaacccttttagccacatgtgagctacaagagaggctttgagggagtggctttcaggctaaagctacgtggagcccattgttaagttcagttgtgtttgtttcataggtgttggttattatgtcaaagggctgggccagtattactctgttagaagttgtattgctgcagaactttaacaagtaacaggtacaaagcttaaaaaaaataaaataaaatacggccgggcgcagtggctcacgcctgtaatcccagcactttgggaggccgagatgggcggatcacgaggtcaggagatcgaggccatcctggctaacacggtgaaaccccatctctactaaaaatacaaaaaaaattagccgggcgtgatggcgggcacctgtaatcccagctactcgggaggctgaggcaggagaatggcgtgaaccagggaggcggagcttgcagtgagccgaaatcgcgctgctgcactccagcctgggagacagagcgagacgctgtctcaaaacaaaaaaaaaaaaaaaaaaaaaaaaaggaaaattaatagtaatagaacgatctcagtttgcgtaatagttttgagccatgaacctaggcttaaagaaaaccagttgaataaattacgtgtccgtggaaaattaggtaaaacctgttgtaaccatgtggcctgttctcttattttgtgtatgtggtctcaacttccccagagaaaagtatgcaggtgcagtaggtagtattagaaatagcacagatatgtcctcatttagccaataaataatatagatcaatttatcatctagcaccccatgactgggttgaattaaagcacagtgagcaacagttatattagggatattgccaaagttatccactaggtagactaaaggatctcataggtcaggttctgtcaagttaccagcagaagctactgatggtgtaatttcaattataccattatcctgccaagtgaaaagggaaggcattagagacataagtcattaatatggagtcttgttctgatgttttgggaaaagctgtctacagcatgaagccatcaatttctcaacctggtttgcagtttgaacatctctgactatggcactgggtagtttggtgaactctgtgcggtccacacatcaggaacaatattttttccttaaaatttatttagcttgagcttatgggcttcaggagcagagcagtttccattcttagtaattccgtggaggaagttcggattggaggaacctagaaaacttcagaatctagtccagtccagatagaaaataaaatcttgaaaataatatatagggctacaatttaataacaggggtattccagcttttaaaaaaaaataactttttctctatagtcttccattttttaccaaagataatcagagtaagacaaatttttttctaaaataagtttagttttctcaattatttacataagtacaactaggatagtgattgattgtgtagcaatctcggatttttaaagcttcttgaggctaaaaagccaaattgaggactgactttagattttgcctgcagtaccttataaacaacttaaatatggcatttcaaagccttagaatatgtcatcttttattgtatcccattataaagagagcaagttcttattgtcataaaaatatgaattcttgcaaatagtttcagaattttggaggggttaagtaagaaggaaaagtaaattttttatctttgaaataaaagtttactttaccaaattgttgtaaagcatagatagcttaagagggaaatgtacttacatttggaaaacatttaagtaaagaactatgtttcaaataaaagttataaaaacattatctttgttagttatttagttttatgtaattaatttttgtttgacttgatctagattagcagtttcatgagtgtataaggttttttttagagtattaaaacatttttatttggcccattgatcttgtaaaccaaaaataaaatttggaaggccctcccaaccccccactgcactttagcctgggcaatagagataccccatctcttaaaaaaataaaagttaaaaaaaaagatttagcatctcttgtaatttgacagtttttacataatctaatattttaaataaacctgagttagtttaatatctctcttttataaacctttgagaggtgctgggatcctctggaacatcccaaagttagttcaagattaaaatagtttagaatttgatcctggggaagcctgccaaagatgttaaaatgttcaaaacacttgattaaaacaggatcacaggtcaccgtgaaataatagtcattcatttcacccgagtaataatcaaagacttcaaaagcaatatagaaagttacgtggttattaaaaaaaaaaaaaaagaactgtaacactttcaaagctacattttcctaagcaatcaaaaaaatcctaataaagtcaacataaaacacaggaaattatttggaaaagcataaaatctttgttttgtaggccagttgccaaaaaggcaaagaaaaacctcctgcagtgtgattttttttctccttatgagaagcccttttagataatggggaagtaaaacctgataaaaaggtacttaaatttaatcaaacacagaaaaagtgtctgttcaacattgtgagtatacaccatagtatagaggaagataaacaagaaaaccagtactttgagcaggaacatatatggcattccataaaataatggaaatttttctggttacatacaacaattcagaagctaggagtacagaatcaagttatactggagaaaagcactgcttttctaggccttcagtacaaacttttcagcatcaggccatcatagcagagttagaaccagagaaaaatgtttcaggaggtgagaaagaaaatcgaaagagagtattatcactccagccaagcaaaaagatgtaccttctcaaagagagaaggagtggcagaaggcaatgatgtatgaccagtaaatcacatgcagtaagatatggcaaaattcttaccaaaaatacatcttcatgcttacaacttttttcttatctttctcctacttatttgttcctttatatcttgcttgtatttccttcctaaatttactttttgaaacgaccttaaataacatctgaatttagataaaagtaagtttttttaataaagaacatgtttttaatgcctttttaattttttaattttaatttttatttatttatttatttttatttatttattttttttgcgatggagtcttgctcttgtcgcccaggctggagtgcaatgacacaatctcggctcactgcaacctctgcctcccaggttccagcaattctcctgcaccagcctcccgagtagctgggattacagctgcctgcaaccacacccagctaattttttgtactttttttagtagatatggggtttcaccatgttggtcaggctggtcttgaactcctgacctcaggtgatccactctcctcggcctcccaaagtgctgggattacaggcatgagccactggcctttttattttttttaatcaaaaacatgtcatattttcagcacactttgtatacacaattatatatattaattagaattttcaactcttagtagccttaatttctggtgaaagcctagctagcaggtaattttgaacgatcacatatcagtatttggtagatgagacccattttataatttttaaaacatgttttccccataacatcatttgtatgtgtattaatagacccaaatatatttagtctttctgtaaaatttaagacaagaataaacttacatatctgttcagcaacaaatgtttcagtattttacccattcataaatgtttatttcatttatattcacccaatttatttattttaataattatacctagagtatttataaaaactgagatactaaacaaaactagttatcatttcatgttatttccctgttaaccatttctatagcctgtgaacagcaggtgctcacctaagtaaacaacttaaatatatgaatattttgcagacaaatcagaagataacagccatttcaattaaaccaacaatattagtgttatatatccaagagtcacacaaagatcattctgtttgtaggcagagcttagagttttataaccttaaacatctagcagagaaaaatataaaattgaccagtagtaaacccaggcaaaaatgtatgctgacaattctgaagacattttctatttcaattttacccacaattttaaaaccagtttatttatcaaagatatgcttaagtcatatgaattaaaggcatttgggttaattactatacattttaacaatttatatgagcacataatccaacctggataaaattcatttaaggtatctctggccaacaacatcagagtctaccatgtaagtaaaacgcacaacctaatacatgcacatatgcataaacatatataaacacacagattttatagctttaatttaataattttagtcatgagatagtaagacatagtaatataaatttaacagtttatttttgactaattgggatctgtacacatggctaagctctacttgtccctgattggtaatctaataaagactgtgaaccaaaatttggggtaaagcagtttgctttaaaaaagaaaatctattactctttccccctgctttgttcaagtttcagatgagctgttttagtttactcttggatgttaatattgcagttaggactggctggaaaactaaactaactccaagtgaccttgaatttagtaacagatttattttactacaagtgaaacagattaagagtaagcagaaaaagaaagaaaaagagagcaatatcttaaaatctctacattttaacccatagttgtggttttcttaggaagtttgaataatggccacagccaataatggcaacagctatattgctctaaattagaagcacaaactttcttaggaagtttgaatggaaattgattaaattccccaattaaaaaatatagattggctcaatggatgaaaaaaaagggccccactatatactgtctacaagaaaatcacttcatctgtaaaggtatacatagactgaaagtgaggagatggaaaaaaaaatattccacaaaaacagaaaccaaatttttattgatgcaatttgcctatcagcttaagaatgtgcacaagaatgagccatatatagccagctggaatccctgaaagaaggctgtaccttgtatgccttcagaatttgaggattccattccactttttattactctcttgagataaaatcctataaactctggcagggaatgttgggggtttggactagtgttttagatgatggcactaccttagtggcttttaattggccacctcacatcccttatttagaatgtttatctttgctcttagaatattttcagaaacaagcaggaagaaaaataaaagacccacattatttacagatgtgcataaccaaaccaaaatgaaactaaagtaagagttctcacaaaaattttaacccaggcatgcagaccaaacaaaacgaggcattcagaaagaatcagagtcagcaagacagctgactggaggcacctggcactggtctccctcacaggacaggaccaaggcaacaaataaacagctaagatgtgattgaagtgttgaatgaaagagtgctggagtgcaaaggcagatatagagaggtacttgtggtgattgcccagcatggaggcaccctgcctttgctgtcccgtctctcttgtccagattgtcccagagtcaggagggacttcccttgcagaacaaaggtaagcagaagattcctaccagcccccattgtcactgcaacacctgcagtccttgctacagaagaatgcccacagtcttcaccagcccttagcccaatttagggagccaccaggaattcacacagctatattgctctaaattagaagcataaggtgtgcactccctatctatctcccatctaccccctttgagataaactgctacaagagagcaccactgtgataccagagccacctctgggatataccctgcttggaagccaatagccactgcacctctccagcccagagggtctatcttcactctgccaagcccacatgggtagctgaatgccacaactctggctacataaagcctagaccccaaattggctgtgactctggttctatacagcagggaaacctacccccccgcccaccgcctacacttccagctggagaaacagtctggcagtcctgctcagggtgaacctgcccttgagctagcccacaagccaccactgtcagacatacccctaggctgaatgagcaatgacacaccacacccagtgcctgagaaacagccttgggggcccattcctggaggacatgccctcaggcctgcccagtggccctgtgcccactcctagggcctaaaaaacagcccaatggacatgcccacaggtcagccaggtagtcacatacccacctgcatggcttgagaaagagccctgtgggcccactcctgacagacatgcccccaggctggtggagaagctatgtgctacactctgggccagggaacagtccagcggtcccatcccaggcagacacacctccaagccagtgaggcagccctctgacacagtaacaaccccaaggctccaacttcagcaagccagatcccaagttgtccaacccgctgtgtgcatgcacagatccctgacttgagaaataactcagcaagcccatcaccagcaaagtcatgccaccaccaccaaaaaaactttagcagcctaggtcaccaagacacttgcaaagattactgtcatatcatggattatagctgaagaaactacatgaagacgacactagtatacccaactagaaccaaaaccatgcatccactcacctgataccacctatccatatgaataaatatctccctacaaaacctattccatctaattggaagaagtgactgttttattggacacatagaaatcagtgtaggaacacatcaaatatgaaaaagcaaggaaatgtgacacctccaagggaatacaataactcttcaataacagatcccaatcataagaaaatatgcaaaatgccagaataagaattcaaaataataatcttaagaaagttcaatgagatacaagagaatataaatagacaatttaacaaaatcagaaaaacaattcatgatttgattgagaaattcagcagatatcattaacaaaagaaccaaaaaaaccctacagctaaagaattctatcaatgaaataaatacattaaagagcttcaacaatagactagataaagcaaaaaataataacttttgaacttgaagacaggtcttttgaaataacttaggcaaactaaataaataaaagagaataaagaaagcctacaggatttatagaacacaattaagtgaaccattttttgcattatgggagtcatagagaagagaacaaaaagataaaaaaacatttagtaagataatagctgaaaattactcaagtattgggagagcgatggacatccagatccaggaagctcaaaggtccttaaataaattcaaaccaaacaggtcctctgtgaggcacactataatcaaattgttaaaggtcaaaaacaaagaatactaaaaacaacaagaaaaacgtgtcaagtcacatataagtgaatctctattaaactaagaacaacattttcagcagaaattttacatgtcagaagaaaatggaatggtatagtcaaagtactgaaagaaaaaataagtcagccaataataaatccagcaaatatatccatcagaaatgaaggagaaatacaatcttttacagacatacaagcaaaaactcaggaaattaatcaccactagaccagtcttactagaagttcttctccctttagaaatgctcaagagagtcttatattcagaaataaaaaaaaataacactatcatgaaaacatgtaaaattataaaactcactggtagagtcacaaaagagaaagaaaaaggaagcaaaacttaccactacagaaaaccaccaagctataaaaataaatagtaaaaaaggaagtaaggaacaaaggatactcaaaacaaccaggaaaaagttaataaaatgacaggagtaagtcctcacctatcaataataactttgaagggaaattgattaaattccccaattaaaaatatagattggctgaatggatttaaaaaagggcccaactatatactgtctacaagaaaatcacttcatctgtaaaggcatacatagactgaaagtgaagagatggaaaaaaaacattgcacacaaacagaaacaaaaaatgagcagagtggcaatatttatatcagataaaacagactttaagtcaaaagctgtaaaaaaaaaaagacaaagaaatgcaacatgtaataatgaaggaatcaattgagcaagaacatacaattgtaaatatatatgcatcccaaggcagagcacccagatatattaaggaaatattattaggaccaaagggagagataaacacaacaagtaataggtggagacttcaacactccactcttagcatggacagatcatctagacagaaatctgtaaacattggacgtaatctacatcatagaccaaatagacctaatagacatgtacagaacatttcactcaacagctgcagaatacacattcttttcattagcacatggaagattcttcaggactgaccatgtgttaggacacaaaacaagcctcaaaaaattttaaaagttaaaatcacatcaagtagcttatctgatcacaatagaataaaactagaaatcaataacaagagaaacattcagaactatagaaatacatgaaaatcaaacaacttgcttccaaatcaccactgtgtaaagtaagaaattagaagaaaatttaaattttttttgaagtaaatgaaactagaaacacaacgtaccaaaacctatgggacccagcaaaaaatagtattcaggggtgagtttatggcaaaaaaagagaaaacttacatcaaaaaagaaatgatttcaaacaagctaatgatgcatctcaaggaactagaaaagcaacaacaaatcaaactcaaaataagtagaaggtaagaaatcatcaagatcagaagagaaataagcaaaattgagatttaaaaaatcagtgaaacaaaatttgttttctgaaaagattagcagaatcaacaaaccattaactagactaagaaaagagacccaaataaacaaaatcaggaatgaaaaagaagacatcaaaacaagtactacagaaatacaaaggatcactaaagactattatgaacaactatatttcaaaaacaggaaaaatataggggaaatgaataaattcctggatacatacaacctacaaagattgaaccaaaaagatatagaaaacccgaatataccaataacaattatgagattaaatcagtaataaaaaatttcccaacaaagaagtctaggactgaatggcttcactgttaaattctgccaaacttttaaagaagaattaataccaattattttcaaactattccaaaaaattaaagaggagattatttttaattcatccatgaggccagcatagccctgataccaaaaccagacatggacccaacaaaaaaagaaaactgcagaccaatatcattgaggaatatagaagcaaaaatcctcatcaaaatactagcaatccaaatccaacaaaacactagaaaaataatacaccatgatcaagtgagatttattccagtgatgtatgcctagctcaacatataaaaatcaataaatgtgatatatcacataaacaaaaagaaagacaaaaaccatacaatcatctcaatagatcagaaaaagcatttgataaaattcaacattactttgtgattaaaaactctcaataaactaggcataaaaggaaagtatcgcaataaattaaaacccatatctgattaaacccacagctaacatcaaaccaaacagagagaaactgaaagcgtttcttctaagaactgaaacaagactggctattttccccactcttatttaatatagtacttgaagtcctagacagagcaattaggcaagagaaagaaataaaggacatccaaatttaaaatgaggaagccaaattgtctttgtttgcagatcacatgatcttacatatagaaaaacctaaaaactctatgaaaaaaactcttagaactgtgaaacaaatttaggaaagtagcaagatacaaaatcaaatgtaaaaatgagtagtgtttctgtacatgtacaacaaactactgaaaaagaaataaaaaagataatcccatttataatagcaaaaataaaataacattctaggaataaatttaaccaaggggatgaaagacctctacaaggaaaaactataaaacattgataaaagaaattgaagaaaatacaaatggaaagacattccatgcttgtagatcagaaatattaatatttttaaaatgaccatgctgtccaaagccatacacagattcaatgcaatccccaataaaataccattgacattcttcacagaaattgaaaaaaaaatactaaaattcatatggaaccacagaagaccctgaatggccaaagtcatcctaagcaaaaagaacaaagctagaggcatgatagtgtcagccttcaaaatatgctacaaaagtatagtaaccaaaacagcattgttctggcataaagacagatgcatagaccaatagaacagaatacagaacccaaaaattaatccatatatctacagccaactagttttggcaaaagcaccaagaacattcattagagaaaggacactctcttcaatacatggtgctgggaaaactgtatattcatatgtggaagaataaaactagactcctatttctcacccaatgtaaaaatcaactcaaaattgattgaaggcctaaatgtatgacctgaaactataaaaataccacaagaaaagattcgagaaatgcttcaggacattggtctagggaaagattttatgaataagactgcaaatgcacagtcaacagaagcaaaaacaaatgagattatattaaacaaaaaatcttctgtacagcaaaggaaacaatcaacaaagtgaaaagacaacctattgaatgggagaaaatatttccaaagtattcacctaacaggagattaatattcagaatataaaaggaacccaaacatctccacagcaaaaaccacacaaacaatccaatttaaaaatgggcaaatgatctggacagacattgccaaaagaagacatacaaatggccaacaaacatatgaaataattctcaacatcattgttttaacaaatgattaaaggaaacttttatacaccattggtggtagtgtaaacacacagattttatgagaacagtatggaggttcctcaaaaaactacaaatacaactctcgtatgacccagcaatcccactatagggcatttatccaaaagaatggaaatcagtacattgaggagacatctacacccccatgtttattgcagcactattcacaataaccaggatataaacacaacctaggtatccaaaaacagataaatgaatgcataaaatgtggtatatttacacaatggaatactattcagtcataaaaaagaatgaaatcctgttatgcacagcaacacagagatagaactggagaatattatgttaagtgaaataaggcaggaacagaaggtcaaacactgcctattttcattcacatgtagaagctgaaaaaagttaatttcataaaagtaaaacgtagagcagatgataccagaggctgggaaggataggaagagatttgttagaagatacaaaattacagctagataggaggaataagttatcatgcgctacagcactagaggacgactatagttaacaataatatatggtttcaaagagctagaaggaggatagtgaatgttactaaaacaaacaaacaaaaaaagggtaaatgtttgagatgataaatatgctaatcacccatatctgatcattattcactggacgtatcaaaacatcaatatgtaccccataaatatgtacaattgtgtcaatttaaaaatatttttaaaaagtgaatttacccaaaaagatataaggtcctcacaggcagaatgtaatttctgtagatactagagttctcaaaccagaaagacagcatttgtctttatatcagaaagggcttgccagaaaagacaaaaagtcttttaccatcctaggaggatgaaaagtcctttattaagatggtcttctccaaatcaaatccaaataaagtcaaagagcttttgccaataagagaaagccttggcctgagagaagactcaccagggccagaaaaggtgggttgtggaaggagagtgctcaaagggctcaagtgagcactgcatacttgttccaagaattgtcaattccttccaaaattggtcttgttttagatctcacttttgactccagatatgtcaacctaaataacaggcagagaggagactgtaaaacaaaaagatatttatcagaatattgcagtgggaatacacatgtcatagtaaattatgtgtgcattcaaggaggttggggtaaaagaaagattttaaaggcaaaatgaagaagattacataaattattttgaatcaattatccttggctacaaacatcaataacaaaggtgtaattagtccaagattagacaggcggttgccagacagatgtccttgcagaagtattttctgtgtaaggttatggtggtatttgtgcaagttgtcatatttgcaaattcttttgtgatagttcttgttattaggcatatgtgaatgagagccctctcttcatgacttttcctggctccatttgtcagagttttaacacaagtcactctactttgattctgacaactttcacagaaagataaaagggagagtttgatggggagctaaagcattgcttgagtaaattaaattcaagctttgcgtacctcaggtggcctaataaaaaagagtcctttaagaaaagaaactgctgtatgtagtgtgtgtatattttccccttaaagcaattttttaaactttaaatcaatgtaacaatatctccccaaaaacaattttctaggagatgatatctatactagctaattatgcaaggcccttccagaaaaaatgctattggtataccagcattgagttcttcccgccatacttctcacattttatcaatacagaaaaagacagatcagaaaatcaattaatataatacaccatattaacagaataatgggtaaatattacatgatgatctcaatagatgcttaaaaatatttgaaaattcagtaccccttaggattacaaattctgaacaaactggtaattttttttttttgagacggagtctcgccctgtcccccaggctggagtgcagtggcgcaatctcagctcactggaagctccgcctcccgggttcacgccattctcctgcctcagcctccggagtagctgggactaaggcgcccgccaactcgcctggctaattttttgcatttttagtagagacggggtttcaccgtgttagccaggatggtttcgatctcctgacctcatgatccgcctgtctcggcctcccagagtgctgggattacaggcgtgggccaagtaaagagctttcttaacctgataaaggccatctacaaaaacctcacagctaacattatactcaatggtattacattttaaaatggtgtcacataagaaagactatctccctaagatcaagaacaagataaggatgtctgctctcaccacttctattcaacattgtactggagtttctagccagggcaactgggcaagaaaattaaacaataggcatccagtttggaaaagaagaagtaaaattatctctatctgcagatgacatgatcttgcatagagaaaactttaagggatccactcacgcctgtaatcctagcactttgggaggcccaggcaggcggatcatgaggtcaggagatcgagaccatcctggctaacacagtgaaaccccatctaaaaatacaaaaaattagctggatgtggtggtgggtgactgtggtcccagctactcaggaggctgaggcaggagaatggcatgaacccaggaggtagagctggcagtgagtcaagatcgcaccactacactccagcctgggcaacagagcaagactctgtctaaaaataaaataaaaaatgataactaataaatagttcagcaaggttgcaggatacaagatcaacatacaaaaaacagttttctttgcagtagcaataaacaaactaaaaatgatattttaaaaagtgccacttacattagtatcagaaagaaaaaatacttatgaataaatgtaacaaaaggtgtacaacacttatactctgaaaagtacaaaacattgttaaaagaaattaataacccaaataagtagaagaacatcctatgttcatgaatggaaaatgatattgttaaggtaacactataccccaaattgatctacaaattcaactcaatccctatcaaaatcacagcaggctcttttgaagaaattgacaagctgttcctaaaatttatgtgggaattcaagatttccatataaaaattgtttttgtagccaaaacaatcttggaaaagaagaacaaagttgaaatattcacatttcttgattttcaaaagttattacaaagctatagtaatcaaaacagtatggtactgccataggacagacatatagataaacggaatataattgaaagttgagaagtaaacctacacatctatagtcaattgactttttaagggtatcttgacaattcagtggggaaaataatagttttttcaacaaatggtgctagagcaactaaatatccacatgcaaaagaatgaaattggactcctacctcataggaggtaaatattaactcaaaatattcaagtaaatatgtcttaaaagaaaacatatgtataaatcttcatgaccttggtttaggcaatgtgtttttggatgtgaactcaaaagcaaaatcaataaaagaaaaaataaatacattgggcttcatcagaattaaaaatatttgtgcttcaggggaacactatgaaaaaaatgaaaagataacttataaaatgggagaaatatttacaaatcacacatctgatagggaaattgcatccagaatatatttaaagacttataactcaatgataaaaatacaaattatcccattaaaagatgggcaaaagatttgaacaaacattcttccaaaaagatatacaacaggtctataagcacatgaaaagatgctcaacatcattaggcatcagaaaatgcaaatcgaatgcaaatctatccaaaaactgtaatgagatatcatttcatatccactcaaatgactatcatcaaaaaggtagatagtaacaagtgttggcaaggatatggagaaattggaatcatcatacacaactagtgagaatgtaaaatggggcagctgttgtgaaaaacagtccagcagttcctcaaaaggctaaagatagagttactagatgatccagacattaaactcctaggttaatatccaaagagagataaaaacatatttctatacaaaaacgtgtacataaatgttcacagaagcattattcctaatagccaaaaaggggaagcaacccagctgtctatcagctgataaatgcataaacaaaactgcacatccattcaataaaatattatttggtaataaagagaaatgaagtagtgatatatattacaacataaataaaccttgacaattttatgctaaataagggagccagtcacaaaaggccacatattgtgtgattccatttatatgaaatgtccagaataggcaaatccatagcaagagaaaataaattagtggttgcctagagctgaagtgagggtgttagagagaaatggggactaacttctaatggatatgagctctctttttggagtgatgaaatattctggaattagtagtgatgtttgcagaattttgtgagtatactaaaaagactgaattataccctttaaatgggtgaattatatgtcaattatttctcaataacactattgtttataaaaagacaagcctttctacttttagaatctctttccatggagattttgttcactaaaacaagtttaagagccatataggtaaaatcaatggtatgaggcagtcaccatggttgggaccttagggactttttgtttcacagcctaaagccaccgtttaagaaaagccaaacgagcaatgcttattgcagttttcaattgcaaggactgatttgaacctatgtgtgtaaacttgagccctgacagaggaagtcctgtttctttcaattcttacacccaatttcctgatttttattcagcctgaatcactgctcactttgccagggcagccctgtggaattgcctgctcaggcttacctccccatcaacccatgcggagttctgcagcatccactgccttgacctccccatcatccctgatctgccatgctccctgcccaggcaggccttgtgccgccagccagctacctgcctgctcatggaacactctggaaaaaaacacgcttttaagttcttttgatttttcttcctagcatcaatagtcacctgtttagcttccttcctgcacagtaattatactgtattcatagacttatttgacatttccaaagaaaagtgtaattatagcatcctgaaaggtggaaataatctgatgatgatatttgaggagaaaaaaaaaatcactttcaagatttgcttcaactaaatctcgtagaaacagtgttactaaatgctactgaaagcagaggcttggtcattgtccttcacttagatattaaacctttcccaacttcaggcattaagtttctaaggactccaagttaagagagctcacactaagcaacttagaactttaagaagaaaaactgtatttcataggggatagaagatgagaataaactgttgaaaacacttgtaaattcatcttattcatgaaaaaaacactaagtggcaattagaagaatattatttgtattttccacagttttaatgaataatagtagtattattaggtactatagtattcatttcatttaccatcacctgctcgccaaacactttttagaatttcagtgatgatcttttactatgcctcctaccaacagatacttttttcaagcattgaataagtgtcagcattgtgctaggtgcttaatgcacaagatcacggcacacagccctaggttcaaattgggatgtcaccacctgttagttatgaccctcaagtccacaatctccgtttcttaaccacaaagtgctatataaatttgatttattatattttcacgtcgctatactgtaagcctcccacatctgctttggtgagagatatggaagctgtcctgtatgagatttttagacgtcagggtattataattaaaagtcctatgtaaggctgaagatactgaatccttgagaaccaacctggggccccagaatcctcaactgaccagatgcactgatggtattagctcctagacgcccttttaggtatccttgcctgcaaggcctttttttgtttttcttcagcaaattatcattttggatgcagctcagtccaagcacagctttaattaatgagtcaggtttccggcattgataagaattgctaggttaaggtcgcatgtggagggcagtctttattaaatacgctaaatgtggttgcaatttgaaatgctattgtctgtctcttcctgagctgctgtcttattctaacagaagccatggtcttccaaatcccaaaggcagtagtgaaagggcactatggggaaagacatttacttttatcctgactattaaaataaaacagtgctactacctatgtatctgggcaggatggcatgacatccctacagatggtctgcttaaaggccccttcagacttcagtgtccccatgcttattctggggctcctagcctactctaatgacaaccagataccagacgttttgcttccaaccctaaaacctaaaacagagtcacaatagcatttaaaaatttttaaattattttttatatttattactttttatttataacatcttttgaaacattccatggggctttttttctttaagaaaggttaattttatagagattttacacttatttttttctccctatcaacatcttgaaccagagtggtgcatctgtcacaactgatgaatctacattgacacattatcttcaaaagtctgtaatttacattagattcatgcttagtgttgtacattctatgggtttgggacaaatgtataatggcatatatccaatggtgtaatatcttacagagtattttcattgccctaaaaatcctcagtgctccacctatgtatccttatttactgtcgctatagttttgccttttccagaatggtttcttttgcttagtaatatgcatttacaatttctccatgtctttttgtgacttgatagctcatttcttttagtgctgaataatattccattgtctggatgtaccacagttaatttgcccattcacatactgaaggacatcttggttactttcaagatttggcaattatgaataacgctgctataaacagtgtgtatagatttttgtatggacatcttttcaagtcatttgggtaaataccaagaagtgtgactgccagatcgtatgttaagagtacatttagttttgtaaaaaactgccaaactgttttccaaagtggctgtattattttacattcccatgagcaatgaatgagagttcctgttttccacaccttcatttaatttataacattttacaaacaatttatttagacatatttaaatattcacattttaaaagcataatgagtaaaatcataggcaccaaaagaatgagttgcaagagaaatgatcatatttttcaatggaaggaccaccagtccataaacacaggactaagtctcaacaattagcaccaaatattggcactcttagttcagggaatgaatcactataagataataattttaaaaagcaacaaataaaagcaagcagaattgtggcaaacacgctttgttgcagcgaaagtgtttagaatttaccctagactcgccataacgtgcaaccaaagaaacagcatgccaacattaaaccatgacatctccctggcacatagacaggccattggccagatggttgcagaggtgaaggcactatcccagtctagtcctaagccaaaagatgacttagtgagagccagtctcatgtctgagaggatgaagatctgatctgaggaagaaaccttcctcttctggcccaaccacagatgtctggcattcttattcctgtctggctattaaaggcagaagttttcagtgtgattgtattcaacgtgtgttcactaactacaggctaggggagtcctaatctctctgctttgaataacttgctcaaagctcaaaatcccatgggtaacatccagctggctggaggccctaggccacatgctcaattctggcggctaagatgaggagagagcaagcatcagactgtatctcctttcttagtgaaaagtgggctctgcctcttgtcaatggaacattctccaaaactaggagatgggctcagtacagggcagccaaccaatgacctgtatccaccataccatctttctcctccctgcaaatgccagctttgtctccttttcaggatctttgttcttgcagttcccactgctagcttctgtcccccatgttaatgtggctggctctgtcccatccctcggttctcagctcctcagaccacatagaatacctgttctccctgaagcctctctgaaccacctctccctttctccctttctttcctaactcatcagtccctgacaattaccttgaacattgctttttcctcatgcattgtacatcttgatcattccaccagtatggaaactccataaggacagagagcctggctgtcctgttgctcagctctttccccagtgtcctgtctgccatgatcacagctcagtaaatgtttgggaagcatgaatgaacttaatggcttcaagactctgccccaacattcttttgggtcatttattgcagacgcatctgcttccatttctcaggcaccaggattctagtttaatgccctgacttaacatttgcctttagccaccaactggatattccagcttttatctaggtcttctccatccctcattcttttgagtgagtaaacctccactccagccattagcccggagatgccagcctcaaccctttgagcacctattttatccagttccacctcagtgttgggggattgggaggggtgtggggaaagtgaggaagaaggcaagaggagacacttggatatgaagtatgactagcttcaagaagggacagatttgtgagtgggattaaggttaggggacagatacagaaaagcaatgtgcagtgtgcagggactggggcagggccctagaggaagagaaacagcaggagagccatgaatggggataaagagcttgaaaatcactctcgcctaggctgactagatggagtttgggactcacgataaaattcgataaatatttttaagattctgcttagaaccagcactgtgctgtctaccacaggagtcagaacaaaaagataaaagctacgccctctagaatccccttggggttcacgatcgaggcattgcctatgggccccagggtaagcaactctatgtgtttctctcccactttgtgggccaaggtgttctatacatttgagactgaaattaatataacaataaaaaaatcacatgacataccctttcttgccaatggctaaaatagtaatagctcatagtcattgagcccttaaaaagcattgaactaaatacttttcatgcatcatttcactgaactctcaacaaccagttgaagttattaatattactggcatttacaggtgaggaaactaaaccttggacatgttccaaggtcacacagctgactgggatgtgtatgaggcatctctcttcaatggccttttgctgccataactcatgctgtctgtacaggctttccccatccctttctctttttatcaaaatgatgcttattcttcaaggctgttctcatttaagacttcctggatgacgtcagaatcaacttcttttccctctgtatttgtataccaattcacttgaatggctatttagcctaatatctaacattgccctttattatatagtcacatgtcacttaatattggggatacatcccgagaatgtatcgttaagcaattatgtccttgagcaaatagcatagcgtgcacttacacaaacctagatggtggagcctactacacacctaggctgatggtatataacctattgctcctaggctataacctgcacagcatgttactgtactgaatattgtcagcaattgtaacacaatggtaagtatttatgtatctaaacatagaaaaggtacaataaaaatatggtattataaacttatgggaccaccactgtatatgcagtccatcatttaccaaaacatcattatgtgcacatggctctaattggttcattaagtagttacatgtaggagccgtagagtcataagttcaaatgtagctccatcacatattaactgtgtggcccctacttacaagctgtctaagcctcagtttctccacctgttatgcaggactgataaaaactagctcaaaaggctgttacagagattcaagatagccaggggcagtggtgtgtgcctgtagttccagctacttgaaaggctgaggcaagaggatttcttgagcccaggggtttgaggccagcctgggcaacatagtgagaccccatgtctaaaaggatttgactgaacgctcaaactctaacaacatgatcctatttttctggccccttctctgccccactcaattgtaagctccaagagggaaaggcccatgttataactacgtctgtttcttgcctccagtaaccaccacaggccttggcacctgctaagccctcattatgcacaggtcgactgaaacatgtaaccagaggtagtgatgtggagaagggagaagcacatccacttgctgttctaatcattgattccccactggccagtcaagggtcacaatatttgcccatccatgtatcaccattatgatttgatttttttcgcatctactccttttcctctaaaattttaagatgaaagtttttataataagaaaaaggtgaaagaattttatgtaaaacacctatatacctaccacccagattctatcattaacattgtattgtatttaatttatcacatatctgtctattcttctatcagttaatcttatttctggttcatttataagtgagttgcagatctcagtatacttcccccttacttccagcatgcatataattgactagagttaaatacattttacaattttgttgtaaatttacataaaataaaattcaaaaatcttaagtatactactttgagttttgacctaaaccactatcaagatacagaacgttactgtcaccccggagtcccttcatgtcaatctccatccccacactgagacaactactgtctcgatgtttttcctcccattgcctgttctaaaacttcatataaatgacattatatggtaataactttttcaaactaaataatttttaaagtaacattttacaactaaaagaaaataaaaattatatcagttactataaagagattctatcattaacatttattatatttgctttatcacatatctatccttctatctttccatcagtttatcttactattaaataacacaaacagaaaaaaacacataaacaggaaaaaaaaaaccacagccaaaaataagcatctgtatactcataaaattacccttgaacggcctttgttcatgaaccactgtggttctcacagtgtgttccagggatcccggggcctccaagacccttgtacattcgtaggatcaaaactattttcataataatcctgagatgttatttacccttttcaccctcattagtctcatgagtacagtgtagttttccagaggctgcatgatgtgatatcacaagaggttgaaggcaaaagcagatatgagaagccagcaggctgtcttctattaggccagacacttaaaacgcttgcaaaactgtaaaacaattctgctcgttccataaaattgttttgttcggaaaatgttatttaaataaaatatatttttatgttaacaggtaatcagtttattattttaagtgaattaataactaagtacagtatttacatttttttctcaatgttaaactctgtgaaagaaaatgaagtcattaaggctaaggctttaaagaggggttgggagatttcaagaggattgcactcacacctgctaaaggtcaaaccacaggatgttgcaatagactcggaaaacaactgaagtcagtcttcgtctgccttcaacatctctcagctgggaataccctaagtaatcaataagaatgggtttgcaatttaggatttctgaccagccattggactaccttcagaaataacttgtggtggaaatcccctattaaaaaaaacctctctgtgcttaccttatgggacactattcagagctgatctgactcagtttacctaagctgcacatcttggtttcctgaataagtggtatttcctttcacctctgtgtcaattttttgacagtaatatggtgaatattgataaatttaactcatgtaaacaaaagctcattggcatctgcaataatttttaagatagtaaagagtacagtgacaaaaatttggcggcactggaaaagccagcctgccctggtctgcactgcctttgaagttacccagcctccactggtaaatgttagagccaacctcttatttggtgaaaacacacttcgcataaactggctggaaacacatatttaaaccaaacccttttttgtacttatttggattaaaagaaagctttcattagaaaacataaagcctattttctttttaaatcaagccacaattctaaccagcagaggatgaaattcagcaaggagagaatgaacagaggcaatgagaaaggcatcagatcattatgaatgggatgcaatgcgcgtgcttaggaaagattgatttgagcagcgcatgtaaacagtcctggctgtgggggaaagtttccttcacatttatcttctctcaaaaccaagagagaatttgctagttcatttttttcctattagctctgcagtcttaaaaaaagattgtaccctactcttgtgttgcaacaactttctttcctatttaccccaactagaaggacaggatcatgtttctgcatttcaaaactgtatttcaaaaaccatttcaagaactataccattccagttcttcagctttattttgtaggctatttgtgtgtgtgtgtgtcaaaacaggctaagctccaattttgccttcagtcctttaaaactgtagcacaaaatgcaaggtcaagaggtagcatttaaagacatcgtcccacatggtctatttttggtctctctttttgatgatatatagttttggttgatgcaacttgaagatgttcacctggagcccttgataaagggacaaatgtcacagagctgagaagccatctctttcgcatgatcccaagatctccagctatgctttatctccagtaagactgatgagaactagctgcttcaaatacaaatgagagcctccttttatcaatctggcaaggtaaattcttgtaaaggtgggcattctccttcaccaaggacaaaacaaaggggaaagaacttcaagtgcaactgcagggatttaggctgaatgtcgagcaaaacctctgtgagtaaatgttatctaccagctggggactgagccaaagcaaaggtcagcggccatctctttcagagagggaatggtgcctaccagattcagttgagagacaaagtcaacatcagttgccaagagcctctgcttggcagccaaagtccagaagatcagtgacaaggagaccaaaggagaaaacatagggagccatggagcagccacacagtgccctccacagcacctcttccttaccctttcacctctctccatcccgatcattcctgggataatcaattagagatgcgaaaaatattgcagttctcaggggaatatcttagggtggattttcaacaacacaacctatgatggtgtagctaaagaaaaaccttggcctctctacctcttccctctccctctctttctccctctctctcccccatcctttcttatcccaggcccatgatacccaagagacaacagaacagattcgtgaaatcaatcacacgggtgaattgcccatccaaatcagggagcttgattttctaacttaacgttaaatcacctcacacatctcttaaggccagagtcactacagagacacaacattgctaaagttgagcttgacagtgtcagagggtcagactcctggcttggtcctcagaaccccagaaagaaggcagctggaggaaaccagcagtgtgatctcactgcaaggtgcagtaacagcacaggggtggggctgctttataaggcttttgattaaattcagtgctgccaaaaggactgagggactttagtaggcaaaggcatttatgagtaggaactgacttttctgggctgggcacggtggctcatgcctgtaatcccagcacttctggaggccaaggcaggcggatcactgagctcagaagtttgagactagcctgggaaacatggtgaaacctcatctctgctaaaaatacaagaaatttaaaaaaaaattagaggggtgtggtgacatgcacctgtagttccagctgctcaggaggctgaggcaggggaatcacttgaacccgggaggcagaggctgcagtgagctgagattgcaccactgcactccagcctaggtgacagagtgagactccatctccaaaacaaaacaaaacaaaacaaaaacctgacttttctgaatttggcttctagacaaaaaaaatactactttgaactaagtctctacattaaaacagattcacatcatggcatttgatcctcatgagaatctgcccctttttactctcttgcactggttagtgattctcccacaccaagaaattgcaggagactgaaaggaaaaacagactgagttatcagtgggatcatcaacattgatgaaatttatgagttaatgccagattctttggtataccttgcctatgagactcaagtcggtttttgaattttttaggtctatttgtttggtttcagtctttactgtcaaccatcagtaacagatgcaatagataaaaccacttgttcagttgatttaatttggttatttgcagtggtttaaaagaagtgtttttgtttttgtttttggggggttttttgtttgcttggttttttgttgttgttgtttcttattttaccctggctcacactggaatcacccagaattttaaaaaatactgatgccagggtctcaccctaagaaattttgattcagtcggtctggggtatgtcttgggcatggagagcttttaaatttctccaggtgattttcatgtgcagccatgcttgaaatctactggctaaaagcaatggttctcaaatttagcatgcctcagaatcacccagcatgctggataaaacagattgcaggaccccaccaccaagtcctaggtgcagatgagccccagttcccataagatctcatgagatcccaggcaatgctgatgttcctggcccgatgaccaccctttgtgaaccactggcttaaataattagtgccaacacttttctctaagatgattttcattacattgatctggcgccaaggagagtgctctaagaagcagacatccaataatgacaacatccagtggaaatagagccttcctatctcttagacctcatggaacttcttgggttctgagactatttatatgtatacaagagaagggaccagactgtggtaatgggtgcctaggcaaggggaatttgtatcgcttctgctgtggtttctggccacaatccctcatttatatgtcctggctacccccagcaggtacatgggtgagggtttcaggatcatggggaagggctggctctggctcaaccagggctaaagctgaaagcctctttggattctgtgaccttctaacttgggaacctgttgagcatgaaatgtgtgtatgtgtgtgtgtgtgtgtgtgtgtgtgtgtgtctatgaaagtgcaatcttttttaggtctttggggcctaataagaggtcatctctatgtcctgtccagattggcaagagcacaacaaagcagtaaagagcattccccagtggcacaaatccatctgtacagtagaggaagaagcagccatggtgtgccctcactatgctccagtgccctctctaagcaaaatctgaaagcaggtctgatggctttaaacttgggaaatcttagaagacttcagacaactgggggctggggaggctccaatgaggaactcgtatattcccttgctactctgccatgcacggactcaaaacaatgaatttctaaaagcaaaaggatatgatttatagctttgctttttcccaagcggaggaatgtcatgcaagttgcacatacacatgacaagaacaaggcttttattaatattcttcatacccaacaatgataatacactataaaactgtatctgtgaaatctcacttgacctacttagaactataagggagatgatttggttgatgcaaattgtgtcatatgtttgagatgaggaaacaaagacacagagagtttacacaattaacttagtgcctcagatagggctgaatttcccagtccccactccatgttgaaggatagagaagagggacttcagggactaccttgaaggccacagccagggagatgttcaaagcccctcctccattccagcctaagaattcttcttcagtctgtatgtatttcatgtttctgtttaatattttatttcagagatttttgttggaacacctggaaccccaaaccctgcaaactgcatgtcacttcttgagagcccatcttccaaagaacccctctctatgctgaaggttctcttatgctataagaacataagatagttctcatggggcccattcatttttaaaaattggttaaccctacttcagtgcacatcagaatcacctaggaagcttgttaaaatccaggtttctgggcctcctaccctgaagaacaaggaaggaggccatttatcaggcttttggagtacagcctgagaatgtgcatgtttaacaaattcccagacagtgctgctgtgggtctgaggacccaccctttgaaaaccactacaataagatcacccagaaactcagatcacccagaaatcttttaggtagtataaataccagcctccactgagactaattaaatcagactctttacaggcaaagtctgggcattaatgtgtttaaaatggtctccaggtacagccaaggttgagaacttctgcaataaggggaaccctatgtagaattatatgatattcaaacccctaggtcaggagttctcaaaatgtggtcccttgcccagcagtatcagcataaccgtcagtatcacttgggaacttgttagaaaagcaaattcaggccccatcccagacttgcagaatcagaaactctgagggtagggcccagcaatctgttttaacaaacactaggtgaatctgagacttgctgaagttggagaactattactctaagcttttggcttccctgtaaatgagtccctgaaagttggactcttatctaggggcagtgacagttgtaggcccatagcaggctggatgcaccaactgctccatcagagcaggggtggctgaaggacaaggaaggagatcatttatcaggctgtcagtgaagtactatgacacacagctaacatcctttccaggacatctggtttctcagctctatgagataaggcctataaattactttgtaatgggtttcacctctgaatactcagatgcaggttcagcttcaggcaaaattgctatgtaggtaaaccaagcttgggtcttccacctttgcctttcctagccccttctctttttctatccacaaccaacaattctccaaggaaggctttgttcattgctattaagttatttcagccctggaggacagctcaacgaagtggctgattgaacttgaatgtgtctccacctcctgagggtacatttattctaaaagaagacaactaggctgagccatgcttaatacagcagaatgtgtcttcagagatagaatattgaacccttgacctcattgaaaaacagaccatatcttttagataattacctgtttctttggcatcaagctctctttaacccacattttatatatgtctacccccttttgccttccatttcctaaagatatacaatatggtaggtggcaaaaatggcccaaaatgcttccccttgcatcaagaggtgaagtttattgtagcagctcttaaatccaggttggcctggtgatatgctttggcttaatgggacattagaaaccttgatgctggaagagacttgaaaaatccttgagcactggggcttgttttcatgccaagactgccatgtaattaagcccacatgagcagcttaaaaatgagaagccacatagaggggaatccatgtgatttagctatgagtgagaccatcctagttcatcctaccagacaatttgccaaacgaccacagatgaacaagcccagcagagatcagccaacctggcctagacagaagaaccacctagctgacccccagaattgtgaactaaataaatagttccactcatgtttgggttgtttgttacacagcaaaagctaactgatacacttgattctattgacagagcgagtctctgtctcaaaaaaataaataaagttatattgattacatctaaagattatctgaagaaagaaatcatcttggaaatgttaccttctctgggatgccttccctgagcatctgtcttccatgtagccttagctcccatgtaggttaggctggtgactgttcagatgttctacaaaatcagtgtttatgtctgcctaacacttgtctctataatttccagttatgtttatctgcccccctctactctctgactgagaaattttaaaggtagaaaccatgtcttaattgtctttgtacttccagcccctaactcatttattctatgttatgttgagctgcacaaatgaaatatttgactcagatgagcatggggagggagggtagggaaagcagccagcaatgctttgcattagtcacaagctggagcctagaatctcccctggaacaatccacacccaccaaactcacaaaatccaaataaactaatgcttatctggcccaggaccttcagaacacagaggtctttgtcttgtgagagatggattatctacctctttcatttcataagagtttacaggaaaaaaatgttttattcaaagatttcaaagatacccattttacattgtttttctcatttcacctcccatgatgagacaggaagggactctgtatgcctatatgacacatcacaaatccaggattaccagttttacttctttccccaaaccccagtttcccttggtcatagggaatagctggacataataatgataaaaaatagttcacccttgccagttgtcaccgggggacctgcattgtactctaacctgagtctccatcaccttgcccggtcattacaatgctctgggaatttattatgatacccattttacaaacaagggctcagagagtctaagatgaaaagatccacacacaggtggaagagccagatcttgctaattcgaaaactgatgttcttaaaccactgtgatgctgaaatgtatgatctaaaggctgtagagctattatcttgatatcttgtttccgtcacccaccccatggagctgacccactttgcaaaggaaagagacaggtgaaagcttcaccaaaggtcacccagcaagggaagggatggcttctggccaggcaatgccgcatcattgtttgggctattatgaagctgtgatgcctgacatggcccctgcaaagctgccacctaggtacactgttagcagaaagagtcaatgggcggtggcaggcagtcagacaggacagcaaagaagaagattaaaataattacagctctaattgatcagctctgctcaagaggagattaaaagggaaaaggcatattgaagaaggcactcgacatccgccctgggccagattccatctgctactgtagccagctctctcccctccctcctggctctctgtccagcagcccccactgcagagctccaggacacaggcttgatgaaagtcattctttgtggaaggcatcaggctgtgctcccgtgaagaactggtttcacaaacagcagggaagaagcagctcccagcagcagatagtggcctccgttggcaatgctctagcacggaattgccagcagcatgtggaaaaggaagaaggagatgaccagaacgaggccaacaaggggcaggggactggggcagaagatcagcctgcaccttgtcatctgataacctcagcctggcattaacagcctgggctccaagcagcactggctctggtttcagcttagcacactttctgacttagcttttggcttattgtcatttaggagcaggtccagggagcagtttttccttgtccctagcacccttatgtaggaattgtagaggaagggcagaggaagggattggggccaggaaggatagaggaaggccgattaggagggagtagcagcagccctggctttgccaaggccatctgtttacacagagtctgaacaaggtcaagagcaggtgatgggggcaaggagcaggaagaaacctgcaggtcacctttcttacatataggacaggtgatcacacctagtggaaggggaactgggtcaaacacttatctcctgtgtttaggctcacttctgacagcatggcatgcaagaggaccagaataatcagagaccataaacctcaaggttcacttttactttatattacaggggctccagcaagcatttgcgctggcttccaaagatggttgggccaagtggtcagggcagagtcagacatccatccaccacatggactgtgggagctgagaaaaaaatgaatcatttttccctctcactgccaagtataagccagtgtgtctcaaactgcagggtccataacaatcaccgggggatccttttaaaatgcagattatgattcagaaagtccaacatgaagcctgagattctctatttccaacaagtcctgagagatgctgaatgctgctggtccagggatcagtttgaagagcaaaagcctaaaccatactagaaatagattaaagagcctagatggggatcactcttaataatgataaacaggtactggagataatggcctgcagttagaattaaggttctccaggctgggctcggtggcttacacctgtaatcctggcactttgggaggccaaggtgggtggatcatgaggtcaggagttcaagaccagcctggccaaatggtgaaaccctgtctctactaaaaatacaaaaattagctgggcatggtggcaggagcctataatcccagctactcaggaggctgaggtaggagaaccgcttgaactcagggggcggaggttgcagtgagccaagatcatgccactgtactccagcctgggtgacagagtgagactctgtctcaaaaaataaaaagaaaattaatgttctttctgtccttttccctcctcccaccaatgggccatcctgacatattcaaggcatagcaggggaaaaacagaagctatagaggtgagagagctgagacttggctgggtcagccagatataacctaggaggaccatataccagtaaagattcttccagttgcaaatgccaaaaccaattcaagttcagtgaggctgaaggaggatttattgatccatgtaaacaggtaacaggttggctcttgcctctgggatggctggctgcacccagggtctgtgctggaaggactcttgttagttcctcatcttctgtttcctctgtactcattcacttctactaaccacaggccatcattccttcattcaaatagcaaggaatatgtaggagatgttctggccttggatccttcaatgctagagctctgagatgaaaagaaatttctcttttttaggttcagtttggaaaatctgcaaggatggtctttcgtgaagcctgatggctaatgaaacccttcctccttgttcaatatgtattcttcccttaaatatctcatgggatcagagaaggtgaccccatccctaactctcgtggtaggtctattctttaagccaatccaagtaatcattttgctcttgagaatgactggttctagaatctcgactgaagcttatcaatacaggacattttgttggctattgttataggtctccaattagcacctaactcaatcttggtctatcaggctaaaggaatggatatttactgaaatggagaagacattttctcattcacttgctctctcttccctcctctttctttctttccaaacattcacaatgaaaaataagacctcagtttctgggtaaccatcttgtgaccgtgagagaagccagcctgaaaacaatcattacaggaaggctgcagctgagaaaatgacagagagctagaaccaaagacattattgtacaatgccttagcccttccttccctgtacactttctattatgtgataaaataaacctattgttcattgagtcagaacaaatcatcccaactgaaacatccatcaagttcctgtgctgactgttgagccaaacacagtggctggagcaaggggtactatgactgacctagcagaaattaacgacatgaccccaggaagatagagtttcagaaccgttaagagaaaacacactgaggtggggcagttttccgtgagaagagtggagttgatgccagaagtaaggaatgagggaaaaattctaagtagaaaaaaacaagtggtcctctattgtgatgcagacatatacatcattaagtgtatctagtgtcagaggtgctattagagaagtttgcaaactgatccacggtcactttgcaaacttctctaatagcacctctgatgctggatacacttaaaaatgtgtagtctcaaagaagggagtagtgaagaccacatgggagaatcaggcaaggtttcacagaggagataatgcctcagctgagttgtattggttgcctattactgcataacaaacaatacaaaaacttagtgatttaaaataacaaataacatatattatctcacgtggtttccgtgagctaggaatttgggaggaatcgctcaataggttgcagtcaagatgttgcagatctggtcagaccagagctggtcatctgaaggcatggccaagctcgaggatccacttccaaatggctcattcacatacctggcaagttgatgccatctgttagcaggaggacttactttgtttgctatcccatggacctctccatagagttgcttgagtgtcctcatgacatggcagctgattcatccaatgtgagtgatccaagagagagcaaagttgaagtcacaatctttgttatgattgaagtcatgctccttaatttcctcaatatcctattccatatggtaggtgaccacataggggtcaatatcaggcaatgaaaaccactgtgggccatcctggagtctgactaccacatgagtcttgggaaaggagttcatattatccatgaggagggagtgcagacaaagcaaagaaggaggatgtttggagaggggtagtctttgagtggagcctttagggatgagaagggtgaattgagatataccgggaaagtagaaaagataaaacacgtattaaatgttgtaaattaatttttaaaatgtcatgtgttctgctggacatagaagtgagggagaatcaatgaaatagaagacatggtccctaaggattttttttctaatgaagggagggtaagacatggaaaatagttgaggaaacaaaattactctctccaaaaggagaaagaatttttagcttttgtgaagattattgtttgtacaaagacaatgatcttattcaccaagagaagactcactgggctgaagagtggagttcattattctccaacaaagaagacttgaaaagtgggtaagcctctggatatctttgcttggaaaggttcacatggggataccatcagccttgccaagagtcaagggaacgagatgaagaatctgaattccctagaagtcccatagttaatcactagctctcctgtcttgaaattcagtgtttctcgaagacagagactgggaattccttctttttgtccatccatcacccagcatataactcctgacatttatttgtattgactaactgactaagcaccatctctcagtctccaggctgcgcccggggttgagactcctatagaggaacagagcagggtcaatccaaagagccctttgtacttccgccaacctcagcattgtttgtgtgtatggagaggctttgtgcacagggacatgaggcctgcatttgcaggtccttgagttttctagcagcattcagtgagaaatctgtatctgggataatcaatctggcagaaccagtcttgtaaccaacaagttccctctgcctgtgatcttcatagatggaggtcacagaaagaagtgtcttgatactgtttttgagaatagtaatgcttcaaatatttggagcaccatttctctaaagcactcaaaacgctttccacttggggctttcatgagtgtttatagcacttagctcttcaggtttgccagaaaccaaagaaaccaacttagggtgaaaattatcagtattgttaaacatacacaatacatactcctggaacacttatcaaacattgttccacaagtgacaaaaatgtactttcaagcactcaacaaaatgagacttcaacagcagacttcagtctaattgtgtcagtgagaagccaacctaaatagcgttctttagaggaacgatgtcacgctccatttccactgcctattttaggagccttgttgtttctcccctggactgctgcagtagtctcctaatttgcccctatctcagccctgagtgatagaactttctgtgatgttctatgtcagcactgtccaatatggaagctatgagccacatacgaccagtgagcacctgaaatggggcccgtgcaatgagaaactgaggttttacatttaaaattttttaatgtaaatttaaatggccacatatgctcatggctgctgcattgaacagcacagcagcagattctccacagctcacctagctgatgtcctcagccaccaggcttacaggcatgaggccagtgacaaaatgcacagaatgggggagcagcagtttgtagaaaacttgagacagacacagaaaccgggatctgccattcacagatctccttttcttttcttttttttcttgaagaaaaagtttgaaatctttaattttttatgatgttaaatctccttcatgaaaaagttaattaaaaatgaagtatcttggagccaaaccaacccctcctgctggtttcattcagcccacgggccaccagtttgcaagctctactctagttaacttcctaagagcaaacatgactttattatacctctgctccattacctctcaataaaacccaaacgtccaacctgctacgtaaggctttcccagcatgccctcaagctctccgtcccacctcccaggcactagccatccacctgtgctggattgatcttggggttagttccacacttcactttcctctacccttaaataaaactcacttctccttccatgatgctcactgtctgcctggccacagagccagggatcaacacacctgctacttagactagaatttagtccctggaagccaagctcatccaaccctggtatgagtgctgagcctggcctgtatcagttacttacttcatgaagccttgtcaaaactgtgcagattgaacagagatggcttagtttgccctctcatggcgttttccagagcgcctcatacaatgttgaagctgcatcattgtctgggtaatacctgagttttgctgcttcatgccaagaaaactaaggacacggacacacataaggagtgggtttaagagctgaggtttaataggcaaaagaaagagaacagagaactgagagagacagagagagacacctgaatgggacttctggcccaaggcggaatgcaccggattttatagacaggcttgtagaggcagtgtctgatttacatagggcccagagattggttgaaccaggtgtgatgtttacatagcacgtggggcagactgccccaccctaatcttattatgcacatggggtctttgcctggctggagccatgttgtcttctccttactctactggtggtttggcaaagagaagagaagatggagcagccattttgaacacacctagtcccaggtagccttttcctactggcacaactgcccgcattcacctgtgcaagcttctagtttgcctttctatgtctgcagctcaattttccaggctgctctttgttagaaaagaaatgattttcaggctactttcattaaaaacaaaaacaaaaacctgaccgaggacttccttaccctcactatctgcctaaataatttcttttcgactcatatcaacatgagcacttggtgtgtttgagatgacaggcaagtcacatgagggatgacaacacagctaacttagggaagagcatgctgtttgagtttgtggtcacaaggtagcaaaatccttgcttttcatagctcaaagcagccaggaacctaaaaggaaagaaattatatcctaaccaaccctaaagaaaataacaaaacaacttagtcaatgtgtaacaaccccagaggaagtacataaaaatggtggttattctttcagagtaaaagaataaacagtaataccagaggcagtttttttctccctgtttttaaaacgttgttaataaaaaacttattttcaattcaaaagtaaccatgattattgaaggaaaaaaagagaatggtaaaagaagaaaaaagacagtcattcatagtcccatgattccccaaataacaataatacatgcattgggcttccctgtatcttctgtatagtattttctttttgttttttggctactatttgatattctgttttacattatcattatagtaggataattttttctattattagacatctaaacataatttcactttttatactattcccccaagtagatatactgttaaccacactttagttggccacttaaattatttacaatttgcattctataaataaagcttgcagaatatctttatgaatacaactttttccatagttagaattatttacttagaaaatatcttaaaaagtaaaattcctgtggcaaagaatttgaatattccactggccctaatatatatatgtaaactcaccacttttaggttgagacctcagatctggaaaatgaatttagtgaaaagaaggaaaagtgagctatcaattggcacagacagtctttctcattttccttcataatatgccttattttatgccactacatagctgtggcacatagcaaacatggccacaaattctttccatttttgtttccttctgcgatgtgacttgaaagctccatcaatcaagatatggcagctttatccatgtggcctgacttggttaatagatatcatcacacatgatgaaaacagaggcttgaaaagtgcttgctcaagaagccttgcccactggctgcctttggaactgagcttccatgtgaagaagcctggaatagaagacacggagcagttgaggcaccttatctggttcccccaagaccaacctacctgccaatcaccagacacataagtgaggccatcctggaccatccagctcccaccaggccataaacacctgaaagatcctggcagatatcagtgaagccactcaacctacccagagaattgtgaactaaactaaattgttgctttagattactaagtttagggttagtttgtcagtttgttttgcagtgaaagctaattgatacagacatagattctaaaacagaatgaaataatcaacatacctgcaccatcaaggcagcagaaaatgatttctgcatttgcatgccttcaagatctcaaactcataacaagtagctccttgccagctgacaatacgtccttgccatgttacatataccaacaaattcattttaaagcagtgtttaaacaaatctgctaactacttcttccctgaaaacaagagttcttccttcaaaagcagagccttttgtaaattttagttttggatataacaaaggtccccattttcctctcatactgtcttggagtctggctacctaagggaagaaagggacaaataaataactgtgtggactcatattctgaacccattcaagaaaactctggttcacatcatcaaatacagataatattccctctccttacttccccacctcccaccaggggccaggtcctgtgagctgaaggaacctgttatgctataaaggggaagagagaataagtgtgttctgagcatgggacccatctaggcaatgtgccatattggtgaactcaacttgctgaatttattcattttccaaaatattacagagaccattacccttgctgtttcctcatgagatcccagaaagcagcccctttccaactgagtggaaagctcctttaaatgggtccctctgtgctggaaaggagccacagtgccccgtgcctgtccacaccagctctgaaggagagcagctcctgtcactctgaccatgtctttcataggctgacagcaggaggtctgggggtttggctgggttactactcctgtggcacacagaagaggcagcgtccttctccctagaacctggcaatgctcctggagaataattggagtccaagtgccagttgtcattcaaaggctttgcaacctggggcaagtcacttaacaccactgagtctcagcctccttaactatttcactgatttcccaaggggactaagatagcacaaagacaattttcaaaggcagagtgttaagtgggaattgcactaatcttgacaattggcaaagtactgaacagattctatttttaaaagcacaatccagtcttctatcagactttaaaaggctatccaaattctttgctgtaaaatcttgttgtacaggaaattgcaacatacaattggtcaatttcagtagctggaagttatggtttttctttaatgggtttttgttctgcaactgttagttggatcacaaaatgtggaatgtaccttctgaaaagctcttaagacatgtatatttgagaatccatgctaatcaattgtccaaaatggtaacagaagtcacccaaaccaaattaagcctgtttctagctttctttctaaacactttttgtggcaattgtgaatgggagtttgtacctgatttggttcttggcttgactgtgggcatataagaatgctggtgatttttgtacattgattttgtatcctgaaactttgctaaagatgtttgtcagcttaagaaggttttgggctgagactatggggttttctagatataagttaatgtcatctgcaaactgggatagtttgacttcctctcttcctatttggaatgtcctttatttctttctcttgcctgattgccctggccaggacaatactatgttgaataggggtggtgagagagggcatccttatcttgtgccagtttacacagagaatgcttccagcttttgcccattcaatatgatgttggctgtgggtttgtcatataaggctcttaatattttcaagtatgttccttcaatacctagtctattcaaattttttaaacatgaatgatgttgaatttcaatgaaagcctttctgcatctattgaaataatcatgtggtttttgtctttagttctgtttatgtgatgaatcgtatttattgatttacatatgttgaaccaaccttacatcccagggataaagccttcttgatcttggtggataagctgtttgatgtgctgctggattcagtttgccagtattttgttgaggatttttgcattgatattcatcaaggatattggcctaaagttttctttttttgttgtatctctgccaggttttggtatctggatgatgctgtcctcatagaatgagttagcagagtctctccctcaatgtttttggaatagcttcattaggaatggcaccagctcttctttgtatatctggtagaattcagttgcaactccatctggtcctagtctttttttggttgataggctatttatgactgcctcaatttcagagctcatcattggactgttcagggattcaatttcttcctggttcagtcttgggagggtatatgtgtccaggaatttatccatttcttctagattttctagtttatgtgcaaagaggtgttcataatattctctgatggttttttgtatttctggggggtcagtggtaataaccaccttgtttctgattgtgtttatttgaatcttctctcttttcttctttattaatctagctagcagtctattttatttttttttaaaaaaaaaaccaactcctggattcatttatctcttgaatggtttttcatgtccaatctccttcagttcaggtctgattttggttattttttgtcttttgctagccctgggatttgtttgtgcttggttctctagttcttttagttgtgatgttaggttgttgatttgagatctttctagcttttcgatatgggcctttagtgttcccattcacaactgccccaaaaagaataaaatacctaggaatacaactaactggggaagtaaaagatctctacaagcagaactacaaaccactgctcaaagaaatcaaggatgacacaaatagaaaaacattcaatgttcatggataggaagaatcaatatcattaaaatggccatactgaccaaagtaatttgtagattcaatgctatttctattaaactaccattgaaattcttcacaaaactagaaaagctattttaaaattcatatggaacccaaaaaaagcctaaatagccaaggcagaaagaacaaagctggaggcatcacactacccaacttcaaactatgaaacaggactacagtaaccaaaacaacatgacactgatacaaaaacagacacatagacaaatagaacagaatagagaacccagaaataagatcacaaacctacaactatctgatctttaacaaacctgacaaaaacaagcaacagggaaaggattccttattcaataaatcgtgatgggataactggctagctatatgcagaagattgaaactggaccccttccttacaccatatacaaaaatttactgaagatggattaaagacttacatgtaaaacccaaaactacaaaaactttggaagacaaactaggtaatgccattcagactaggcatgggcaaagatttcatgatgaggacaacaaaagcaattgcaacaaaagcaaaaaatgacaaatggaatctaattacaataaaacatcttctgcacagcaaaagaaactatcagcagagtgaatagataacctaagaatgggagaaaatttttgtaatctatgcatctgacacaggcctaatatccagtatctataaagaacttaaacaaatttacaagaaaaaacaacccattaaaaagtggcaaaggacataagcagatacttttcaaaagaagacatacatgtggccaacaaacatgaaaagaagctcaacatcactgatcattagagaaatgcaaattaaaaccacaatgagatgccatctcacagcagtcagaatggctattcttaaaaagtcaaaaaaataaaagatgttgacaaggttgtggcgataaaggaatgcttatacactgttgatgggagtgtaaattcattcagccattgtggaagatagtgtggtggttcctgaaagacctaaagacagaaatagcatttgacccagtaatcccattactgggtatatacccaaaagaatacaaatcattcttttataaagaaacatgcatgcatgaatgttcattgcagcactattcacaatagcaaagacatggaatcaatctaaatgatcgtcaatgatagactgcataaagaaaatgttgtacatatataccatggaatactatgcagccataaaaaagaatgagatcatgtcctctgcagaggcacagatgaatctggaggccattatcctcagcaaactcatataggaacagaaagccaagtactgtatgttcttacttataagtgggagctaaatgatgggaacacatggacacatagaagggaataacagatactggggtctatcaaaggatggagggtgggaggagggggaggatcaaaaaaataattaatggatactaggcttaatatctgggtgataaaataatctgtacaacaaaccctccttacacaagtttacctatgtaacaatcctgcccatgtacccctgaacttaaaataaaagtttaaaaaaatgctattttttcaatgccaataaaacagatgttattacattgaaaatatgatccttgaaatttttaagaataaacttttgttcaaaagcctaaataaagcttctaaagattaaaaaaatagaaatgaaaaaatactttattgtcattttccccaaattctggctggagaaatccactcactctccctcagtgccaactgtttgcattttctactgctgccacagcaaattactatggacttagtgacttcaaacaacaaaaatttagtgtcgtgttgttctgtaggtcagaagtccaatgtgggtctcactgggctaaagtcagggggtagacaggatgtgtcctttcggaaagatctaaggaagaatttatttctttgctttttccagcttctaaatccacccacattcctcagctcatggtccccattctccatctccaaagccggcaatgtagcaactctgagccttcctccatcatcacatttctttctgacaacagtcaagagagactcggcttttaagaaatcatgtgattagcatgggtctaccccagtgatctaggaaagtctccccatttcaagacccttaatcacatctacagagtcccttttgccatgtaaggtaacatagtcacaggttcctaggatttggacatggtatagagtaaatgcccctgatagcaataactcaggcatactctggaaatgaccctgtgtgggagacacatctgaatgtgtgttccgagctagggaatccgggcatggacaacccagagattcattccttgtctatgggggaacatctgagccccctcagccagtcccgtggacttcgggccatacaggggactgaggccctgcattttgggacaaacgaaggttgtcaggtggaggtctttaaggggagggtgttaagtaaaaaatgctatatgaactccacgctgtttgcacacagttgcaattttcctgtccagcccactgccactggactctctcccctgtatgggagcccctaatcaaaccccatgtcctgtttcctggatctgggtcttttcttcagcctcttgaacctggtgccttccatattaaggttaataggggtttggcacaacacatggacatctttgtggggccatgattctgcctacaacaccccttcactcatgtcttctacctcctgaatgccttgacaactactcttcgtctaacaaactgcaaactaccctttcatgcctcaagtgccctctccttcaggaagctttccctgctcagtctgaatggaagtaatgtctcctcttaattcctttagtgcctatctgccctgatcccttggcaatttagctttttaaactctacatccttcagttcctcaactcatcttttggagccctcttaaagaaaggaggacatccatgtgaacattgcaaagatccaagattctcaattacacatttttaaaggctcgcaatatttagaaatcataactacttaattgattgatcaaaactgccttgtgctaaatgtactttaatttgcagggcaacctaaaaagattaaaaagacatatatactttgcagtaacctggaaaataacttcttgaagtcaaaagacaccatgggagaaagcagtttgttctcttaagctcataaagcaatggagtattgatgcaggtttatacagatcacagaaaacccttctcagcaacctatggagaggctctggtatcttccccaaagcctcaccttcttcacgatccctctgtcaaatggcacctccaaatgtcttctctccatcctggactttctggtaacaaagatttcatcccattttcaagatcttaagttgtcttaagttttacataccacagaaaaattgctgtcaatcaaggttataaatattttacgcaagcaggcagtgaaaaggagattaggaagggcctagaacaatcagctgaaccaatggagaaatacagaacaagtctctatgcgagtatgaagaaatcaggtgatctggcctctggaaaactaagtccctcaggagagtgcctcggggtggcggggggtgtggaattctaaagtactccttttttccagatcacttcttttacttggttttaatattaaatctttatatgcttaatataggttatcacctaaaatgcagtttcctgtgcctaagagcagaatggctgtgttctgtgtgtgcaggaccctggcagggaagagtgtatgaagctggttctactataaaactactataaaacttcaaaggctagaactggactccccaggtagaaaaaaaacatggaattcagttcaataatagaaaaacattttaaaaagtcagacctgtcctcaaatgaagtaggtgacctcagaggggtcactgtgtgcatgactgtggtgcagggatggtgggtaacctgatgacgtcttctagattttgatcaaagggaccattgctttggagggaaagggacacaactctgaccctaaggaggctggaaaacacaggcttggggtgagttgcagacaccttatctgagttcagagacaatgaagtggaccctcctgcctctatttcctaagagaagcagggtgtgactgaatggctgcaaatattctgattctagtgccctgaacttcatgtctgggccctccacacactcgcacccaatgaggctattggcagagcctcagagggaagacgagcatcttatggtaagcagcaaagcaacttgctggtatgattcccaaaccctcttagaaggtgccagcaaatagcctttgcagacaaggagatggatatggaagtgtagaacatcacattactggactcagcagagagcagtgctgtttaagataccaccaaagttgctttaatgagagaaacctcaatgacaaaagccgagagaacacaacaggatactctaggagaaaatctccaaatgagcttgctctccccaataccttcatgccatgatttttcttatttgaaaacagtttttcttaagcaaagatgctgcatctttgaatgagatttaggctaatgcctacatatcatattattatatatatgcaaagcagtgcctggaacattgcaataaatgtcacataacatctttattacattcaccctgagggaaactaggtagaactgcaaatatcttgattaaaacacttatatttaaggactctacttactctttttgatatgtacactttcatagatagataaggaatgcttggctttttcatctcaaataaagcaaaagtgagttataactgtatttcactgtgggcctgggctgtgatttccaccccagggaaagaaggagagagagagagagagagagcgagagagagagagacagagacagagagagagagagagagagagacagagagagagagaagcagaaagagagagagagagagagagagagagagtatagggagacagggataggaggaatagagaaagagaaaggggggaaatattcttatccctctacagacttggctacaggacatggatgtggataaggcccttctcttttcagcccaaaactttgagtgcccaacagtttctttagggctcagcacaattcagataaaagatgggctggaggcagtatgaatgttacctatatgttctttgcctttatagttgatggcacatgtgtatacttttaaccgataactttctcttagagtgttgaatgtgcatttcactgtgatcaacaaactcaaaaaatgaccttgcattgagaaggctaaacggtctccccaactgaggtttgacaaatacttgagcaaaacctctatttctgcacttctcaaggagcttggagcactgggaaatttttaatgaggagtgttatctggactattctcactggtgtgctggtaaataacagtagctttccagggtggggctggggagtcctgatttgtagcatttgccaatttctatggtttaaatagtcctcccatgactaatttcaagctactaatggctcacaaatttcctcaaaattcaacagtcagctctcatgagtcagaatgaactggctcacaccactgaatctattctcatctacctgtgacaaaagaaaatgtaactgttggtcacctgagtattccccctccctattttttttaatgaaatgtcctttttccatcacagccattgcatttgcaagggtcagcccatggcattatccagtagaagcttttactcagggctcaaacaagtagtatggagacccatgaaaagccacccaggccttcctcttgccaattccctttgatttattaaatgcaatgttacccatatggccatgccacaatttggccagtagctctagtttcaaatagattctcaaaattcagagcacaaaattcgtgtgtttgagacttcttctgtcttctttcatcagaggcacctggaagtaatgtgaggatttgtctatggaatggaagaggggcacacatgggaacacagtgggaggaccccaggcctgccttgcctccacctttgagcttgttcatcctcatcctcttttcaaccagtgtagagaggacgagagacagaaaagaatctggggaacctactatcgcatataaacaacttcttttcataattctaacaaaagaggaaactattttcaaaactgggaacccagtattcctttggatcaatatttattctcatttttatgttaaaaaataggggagcaggttcccgggcttcagtttttgtccaggtgactgaatattttctcctttcctttttcaactttttaaagctatgaccaacttgttcttgaccaattgatagggaagtttgtggaaggcagggcagtgacctcatttgctcatagctattgatcgactttaacttgtcctcttgtctttcctataccctctgagtattcagggctggcaatgtggcctttcagtcctggaggctcatagccatgatcatcattaatctgatacctcaaatgccacttctgatgcaaattactttttatatgtgtattggtggacatcagagctgaaaagaagtgtaaaaggaattattaagcaagataatttggctaacacattcctacactgacaccagagtgtcacgttccacacaggagccaagcaaagagcttgggttgtttccacgggataaccagagtctgtgtttgagaagtgttaaatctgatgtgtcgggaccagttcttcttccctggcatgtttttgaggaggtagaacaaaggcccacccaacatgaacaaagagaagaagcccacccagaagaatgcagtcacaaggagccgaaagaaaacactcttctgttgacatttcttctgaaaatcttcatggagtgtagacttggggaaattaccttaaaaatttaataagtctagaaaaggagttatcagaaataaaaatcaggaatctcagcttgtctcttggagaccaaagtctgtctttgaggatgggctctgagttcccatggacatcacctcccacaatgcatgcagcgggcaacatgcttctggctagctttgctgctttctgattaataccataagaaaggaaacatttctccctggaacaactttgtcatcgccttcccttttgaagattttatcaaagcaaacaaagcaaagcaaagctacctctggtgcatcacattgaaggtggtctgaacaaaggaagctgaaagatacagttcatgggctctaaaggccaccctcctgaagcaacccggctcttcctgtttgcctttctcactcgctgctgccagctgggaaactttgccctgtctgggctggttcactcagatttccctgaacatgccctaggatttcagctggagttcactgttccctctccatgttttgttgaaaatgcccttctctgagtatttgtacttaacgcctgcctcacctttgaggttcagctaatgtcccacaattcatgaagctctctcttctgttttttcctggtctgaacatcttcccatcccacaactttttgcctcctaggatttcccctctggctattccccctcagtttcccagccatgttataagcattcctaggtcaggctgggcatagcggcctgtcatccagtgcttcgggaagccaaagtgggaggatagcttgaggccaggaattcgaaactagcctgggcaacataccaagacactttgtctacaaaaaacttagctggacttggtggcatgtgcttatagtaccagctactcaagaggatggcttgagcccaagagtttgaggttttagtgaaccatgatcacacaactgcacttaagccggtgtgataaagtgaaaccctgtctctaaaaaaaataacaatccttaggccctaggtcagaaaccagatcctaatgtatatttttatattctcaacaacctagaaaaatatcgagttcataagaaatgctcagcaaatcttcctacagtggggagataaaaacattgagggtcagagaggttaaaaacattctccaaagatggaaagttaataaatgacagagccggtattcaaatccatattctccaaatcataagtcactgagatatttttctttcctacagaaagcatatgatttatttttaaaattctcaaaacttgatgaatcaatactgagttggtttaggcagtttgactatgtaacaatatactgacagttgtcctttattgaacacctgctgtatactgctggcactgtgcaaaatcctcacagctgttgtctctgccctttttaagaaccacaaatctcacctactccaggtatgatggcttggtcctcagttactcatgggagttccccaggttacagaaaggatgctgttcccaagagtttttaattacttttgggctcagctggagtccattttattacacacattttacagactataaaatgagttgagccttttagatgacaagcagattaagaatagaaacaagattagaaacaaacatgttagataatagatgcttatagaatgaatgaatgaatgatgagaggatgctttaaagaaggaggactggccgggcatggtggctcacgcctgtaatcccagcactttgggaggccgaggcaagtgaatatcacctgaggtcgggagttcaagaccagcctgtcctgcatggcaaaaccccatctctactaaaaataaaaaaattagccagacatggtggcacatgttggtaattccagctacttgggaggctgaggcatgagaatcgcttgaacctgggaggtggaggtttcagtgagttgagatcgcaccactgcactccagcctgggtgacagagtgagactgtctcaaaaaaaaaaaaaaaaaaaagaaggaggaccgttgatcagcttccagattctactgcctaagttgccatcttctcagttttccaatggagccaaggtaaatgggtttttcatccccagtgaaagcagaattggagaaaatggactcagacacttgggctaacagaacagaaggaaaccttcagctttagaaaatggagggcctgtaatattctttatgaacatatggattttctctgcttattatattcagagaagtatacattatctttataatcttgatctagctttccctgggggcaggagctggacctcatgacctttggagacattgcttgtcctgcttggtattctgaatgaggcagtgaggtgtagcggaaggggcatggtcttcctgggtctgaatctcaactggttgtgtaaccttgaaggagttgtttaacatccctgggcacaggtcttcctctttgtaaatggggaataacacctactattttgtaacaattagaaataatactcataaaatacctaattcgtggaacctgtttagtaactggcgatggttgttactggtgctgcttgttaacactacaaagataaagaccattgctcctagcctcttgccagcctgggcaagaaagagcatcaaatgggcttagtgcgtgcacaggttttcctcctctcctatagcaatggtgttggtcacaatgctcagaaaatggtccagggcagataaggactccagctgccaggtgaggagtcctggctgccaacccctgagtaccaccagaggtgacccagtttcatctcattctccagttcctctcagcctcactgctctttcagtttccccaagatcacctttaagtggataaattcagtctcatctaattaatcttaaaaatctctttcttaactctgagagtaaaaaaggacagagtccaactttctaggctggaaattaaaaagcaaatcgaattcattcactgcctctaaatagcctctgtgtaacaaccaaggcacctctaatgaagtctcaaatgatgatctcctatgagtggtgctttattgaatatatcctgctcagtgctaatcaatcattccagtgaggatttctgctgcaggctggagctgatgagccaggcttcataatacttcataagacatgtatgaatactcagactgtaagctgggaagtttactaagcacagacaaagatttctaccaaaggtctttgatggattcttctatgtcccatagaagctcaggttgctgggccaacaaaattcttatctggacacaaggacttgttggtctgctagacccaaagaaaagaccaaactagtccttcctcagttttcactacagctctcagacactggatgcattggagcatggattatctatggctgcataataagccaccaaaaacttgctgaatacaacaatcatttatttagctcgggattctatgagttggcaatgtgggctgggctcagctggctattcttctgctggtctcagctgggcttattcatacgtatgaagtcagctgccacatcagctgggagctggttgctttagtatgacccttgctgagatggctcagctcttctccctatgtctcatcctccagcagtctagcccaggcatgctgttcacatagcttctcaatagggacccaagggccactagagagaacatgtgctaatgcacatgtgcttttcaagccttagattgcatcatatttgctcttgtcccattggccagagcaagtcacatggccaaatgcagcatctttgtgggagggaactatccaagggcatggatacaagaaggtgtgaacatatcaggtacacaacaacctaccataattgattaccataattttctagcataatttaagtctacccacactctcacttcagctaacttttgtgggacatgaacttgagctcatgtttatctttcattatcaaaatactatttcttgatagtttaccacgtaccaagcatgactggaatcattttatctgtgtcatgtgaaccatataataatcttacacggtaggtattattggctgcacttcacggatgagggaaatgaggcttgcagtaactagtccaagtttgcttctgctccataaataacagagctgagatttgaactcaatgtcatctgaggtcaaatttcagcttctgagcaatttattatacaatggccccttcccataaaccactttttttttttaagattttggtggatttccttttaattttgaggcatcaggtaatttatttaaaagcatgataattactatgtacacacagtgccacaggcagctgtgtctccttccaagagaacgttcttcctcaatggctagggaagcccaacagcgaaaacaatgaaaaggctctgctctgccctcgggccttttccgaaatagagccggtgagcctgtgggagccactgaggccaggacagctgtgatgggcagctggcgttcagggctgctatgagtctgcctgaaggggcagcaggcagtccaaaaaataaaaataaaaataaaaaagagaaaagagagtcattgttccattttcaaaatgtcggagtcagcctcctaaagtttccttgcctcacacagagcttgggagaactaccaatgattggcagagagcttgaaagttgaaagtgccttaggactacttggggctcttgaatgagaacttcagattctcaattgccatgttgggtctgcagaaaaaaagctgccgttgcatctaggcctaccaaattgtgccttcctctaaggtgagcccttgggatctcccctctttgctctgtctgtctcagccttgtcctagaagtggcctgaaaaattacaagccactgatttttaacaagagtctaaaaagtcgcatggctggatctgtggaaaatgagcaggggcgagaagcagaacaagtttgctgccctaattcattgtactgacaaagagactttgattagtgcactgcagcgtgtaaggtgtttgacttacagcatcttattatacttttattacagccctggaaggaaggtcgggaagggacaaccaccttcattttgcagatgaaggtgctgagctcagtgggtaacttgcccagaataactcaatgattgaacagcttggataagaacacatccaggtcttctgacattatggtttatgttttattttgctctgagtgttctcctgtggttggccttccttggacacccttgattcctgaataacttggagaaaatgtctgtttctgtaattctaagggtggcatcatccgcctccccacttcagttcctgcagtcacaaatgagaccccaaatatggttccttgtgtggcttgtgatggaacagatgagaatcaacacagcagcaactgcttgcttctatttttataaatactgtttgatgcctcgcaaagaataaattactcagcaattggcctgaaggagagattcagtaagaagtttttggggtctcattgattctcaatgctataaagtcctgttactacaaaaccttccattgtcttcatgtgcacattggacaaacaccacattcttcagcctgccaccatttatcatgcagttctgttttattttccctacattttcagctttaaccagctgatcttcccaaaagtccccccagctcccctttatttgagatgcacttcccatttgtaattccgcatctcctcctcttaggaaaatcctgtccattctcccagtaaagttcaaaacaaaacttgcttctttctgacttcccgagcccaatcaatggcaactctatcagttgtatgactcaggcaaaaaaatcctggaatcatcttcgattcttttctctcacatccatcagcgagccatgtggctctatctggcagctaaggcattttcaccacccagtagttctgtgtctggtccaagcatgaaaccctgttagtatttattatataacatgatcagatactgtgctttgtggtagttatttttactacactggatactctgaagacagggatcaccatttatatatttttatataataataataccacttcatgtgtgaatggcaatttgcagttcacagacattttagttctcatacactgtcctccaagtttgaaaaaaagaggttgagagattatttctcacagccaaaggctcagatctcccatgtgagagagccaggcctttggattccaagttcattgccttgtacccagaaggcactcattaaatagtccctgaaaaatctgtctttaccctttttaaacaaaagtacaagaaagtagaagggcctcttaagcagcattgaaccccgaatctgttcaagtgtatattctcaaagcatggagcaaatcaattaattaattaaatgagcatggtgaccaatcaagatattattcacaattttatttgtttttgtacaaattcctcaaaaggagtcgagtaattttttttcactccctggagcatacatagtagcccaaatggtacctctatcaacaggagaacagaaaaataaattgtagtatagtcatacaacaaaatcatgcaaagcaacaatgataaacataaatgaactactgctatatgtaacaacacaaatgaatatcatatacgtgatactgagtgaaaaaaaaatagtcgcaaaggtatatgtgctataggattttatttacatgaagtccaagaacaggaaaaacaaacactgcatattgtgctaaatgtcacaatagtggttatttctggataggtgaggagggttagtattgattatgaaagggtacaagggaacattctgaagtgctgggaacattccatatcaaggtgcaacaagatctgtgatcatgagccaaacctgacctaccacctgattttgtaaataaagctttattagaccatagccacatactttcatttacatacgctctgtagatgctggattgcactgcaatgacagagctgagtgttgcaacagagaccatatggcctgcaaagcctacattatttattatctgtccctcgacagaaaaagtttgctgatctctgttccataccatgatctgagtagtggttacatgtatgtttatgtatgaaaaatttcatcaagttatatacttttaattactacactaaacacaggaaggaaggaaggaaggaaggaaggaaggaaggaaggaaggaaggaaggaaaaggaagggaagggaaggaaggaaagaaggaaaaagaaggaagaaagggagggagggaggaaaagaaattttaaacatgcagaaatgggtcctagagcaagtcatttgaaaagatcatatcgtataccacactggctaatgaaaatagatacaaccacctatgagtaaccttgtctgtcttgagctacaagtaagaggaaggtaatgttactttccaaatgggcttattgaaacaagatgttgcaatcttttttggatagcagactcttgtggtgcaatctgagtttgagatcttgctctcttactttctcaatgtgtgaccttactgtctccagccctcaattttctccctataagatggatgtagtaatgatacacacctcaaaggggttatcataaaaattgaaaggcataaatatatggaaagtgcttagaacagtacctggaaaaaaactcagtaactgttagaaactataatgaaagctatagatgtcctcactagaaaaatgaactcattcacattcatagactttgaaacagaataataggagagttgaggctgtcccttaagcccagggtgggctggttcttgctgttaaggcataataaaagcatggcaggtcctgtgctggctccaaagctctgagaatgctcaaggctgacacacagcatcccctcacctcaccacaatcaacagtcctgagggggcctctgccagacggtggcaaactgacgtatagttgttccagcttccacactaatttgcccggtgatgggatccagggagtgcagggacagcgctgaatggcacccgctgtgggatgaagccagtcctccacctggagctgtgtccttgcatggcagctgcctccacgtgtggagattcaggcgggacagcccatggcagcagagctgagacgggggcagctgggagagtgtctcttcaaattcattcatctcttccaccttcagggagtgtttgtcatttgctggagcacagctggcctccccagaggtacatggtttttgagaaccaggggcagtcatgcaccagacaggggagtcatgcactagacaggggtagagatgcagtccttggggtaggtgcaccaaccttctccacatgcagcttggagcactgggcatgagcagatgcctgctggtgcccgcactgccaggagacgtgtgtctgatgttccctggcactgggggaactgctggggggagggggcctcttggtactccccacagccaggcctcacaggaatctgactaagggccttgcattgggcactgtccaggggccaggtaccagaggacctgctgcccaactgcaagaggggctggggggagctttgggatttgcctgtgaagagcaaaatagtatcttaacttcttactgtttctccagcaggaagacaatccagattccttactgtttcctgatgctttcttcacgttggaaaagtagggatcagacaaaccttaccatcttggaatcattttttctaaatggggatcatcattcttgttctatctggccttagggggttcctataaaagtcattgacttccaaattcactcaagtttttggcagaattcatttccttgcagccatgaaacaagactgttggcaggaggccaccctcagtgcccagaggagttccttgccctgtgtccctctccacaggccatgttgcacagcacagaagcttgcttccccaaaatcagcaaaggagaaaaaggacaagtctaattgttacaggaaaggggtctggatccagacctcaagagagcgttcttgaatctcgcgcaagaaagaattcagggagagtccacagtacaaagcaaaagcaagtttattaagaaagtaaagtaataaaagaatggctattcaatagacagggcagccctgagggctgctggttgcccatttttatggttatttctggatgatatgctaaacaaggggtggactcttcatacctcccctttttaggccatatagggtaacttcctgacattgccatgacatttgtacactgtcgtggcactggtgggagtgtagcagtgaggacgaccagcggtcactttcgtggtcatcttgattttggtgggttttggtcagtttccttactacaacctattttatcagcaaggtctttatgagatgtatcttgtgccgacttcctatctcattctatgacttagaatgccttatttttcctagctcctgttcaacatgcagtcactttggttttcaaatgcctctgacatattttgtcaattatacttcagtaaagctaaataaaataaaatgaaattttaaatttcaaaaaaattaaaaagcctgcaagcaagacagagttttagataatataacatcacaggagtgaagtatcatcactttgtcatatggtgttgatgaggagcgagtcacaggccccatctacgttcaagaagggggacttaaacaaaggcacaaatactaggaggtgggaatcatgaggccaacttaaagtctgttcatcacagaggacacaaagaaagggccaactttgggaactataggggtcaaaaggaagaaatcagatactcatggtcttaaggcccagaaaaagaaaagatcaatgcactttgaagtgcagattacagaaagaaatatcttgtatgtgcaaacctcttagagtttacgttgcatcattgcatgtcatttaatatgctcacacatcctacagtggagcttcatttgacaggagaaaaattctgagaggttaagaaacttttccaagatcaccagctgattaataactaagctagaattatttttcaggacttccaatcccaaagcccatgtacttctgtggttagctttaaaaggtagatgaatggagagtgacatcagcagaaatgatggtgtaaggacctctaaaaatcctcccctccagaaaaacaatgagaacactcaaaaaatatccaaataaacttttttagaactgtaaactttttttttttaaatcttgcaacaatttggagagtctttattcaagaaaaagatctcgacctcagtaagaaaacagagtggtgtggtgttttaatttgtcctatactcattctccttcccctagatccatggtagccttgaaaaccaacatcttcacagtcatagtgaaaaccagcatcttaaaagccactggagagggcagaatgtggttaaagttcttctaaattcccattatcatatgactatcatgatttgatcttccctggaaaatcaaagtttatctttattcgaccagactcagagctaactcagtgcaaacagcctttcatattggagtatatgttggaatcagtggcaattgcttaacattacagctccctgaagtggtgatagtagttgggtaaaacagcaagctaatcaaaaacttaaaacgaaaagcttgagaatgagatgcccatggggctttgtaaaggtccaacatgttcttggaaatctagacagccacgtatgcatagtgatgtgcatatgaccaggaaaatctgaggtcttaaactctcgcctctaggtgacctcgagtctccacacaagtaagaagtaaagggtaaggcaaagttgtgaactatctgctgtagcattaaaaatgtgccccaatgtgcacaaagagcttcttggtataacctgtagacttatttgtttcagacatttaagaaaatctgtctaaccattagctgaccactaaacgaatggagcagagatttcagtggctatgcacaacagatacagattttacagaattagttcatgaaaagtcactaaaaaaagcagtaacaacagtaatgacaaacaattacagtaaagccttgaaagaaataaaactgatctacagttaccacattataatattcaaaatgtccaggttttagcaaaaaattataaagcatgcgaagaaacaagaaagtatgttctatttacaagaaaggtaacaaaacagtccctgaagaagcacagacctttaactcacgaaagatattaaattaactgtcttaaatatgctttaaaaaccaaaagaaaccataggcagataaagaaaaccaatagaacagacttgttttcttcatctcttttcaatttgttaacaaattaaaaatatctataaagacagacattacaattagccaggcatagtgacgcatgcctgtagtaccagctacttgggaggctgaggcaggagaatctcttggacctgggaggcggaggttgcagtgagttgagatagtgccactgcactccatcctggacaacagagcgagactccatctcaaaaaaaaaattaaagaaaaagaaattataaaagaaaatcaaacagaaaatctggagcttgaagattacaataactaaaatttaaaattcattagaagcttttcacagaaaatctgagcacacatagaaagaatcagtggatttgaagataagtcaattaaaattatccattctgaggagccaaaagaaaatggaatttttaaaaaagaaacagaaactaagagacctgtgggacaccatctagtaaagaaataaataaatgatagaaactccagatagagagaaaacagaaaaaggaacagaaaaaatatttaaaaaaagatgaagaacttttcaaatttaattaaaaatattaatgcacacatccaagaagctcagtgaactcgaagtaggataaactcaaagaaagccatacctaacacatcatactcaaactgtcaaaagccaagccttataaattgatctcaaaaccaacaagagagaatgattcatcacaacaagatatcctcaataagattgatagtcgatttctcattagaaaccacggaagccaggaggcagtgggataatgtattcaaaatgtttcaaggctgctggccaaaaattctatactcagcaaaactactcttcaaatataaaggagaaattaagacatttctagagaaataaaactttaagaatttgtgaccagaagtagatccgtcctacaaaacatactaatacaaatctttacagttaaaatgaaagaacactagacaacaacttgaatccatataatgaaataaaaaacaccagtaaaattaattacagagggaaatataaaagccagcacatgtatattttttggctgtaaacctttttcttctctcaacttattaatatcttaaagatagatgcataaagcaggaattgtaaatccgtgttaggcataaactttataaagatgtaatttgtacaagaatgatagcaaaaaggtgagagaaggaaatggagatatataggaataaaatttttgtaaactattaaaataattttatattactctaaactagattgttatttggtgttcattgtaatcccatgcatgcacacacattcacagaaatgtagtaaaagaaatgacataggaataaaaatgttacactaaaaatacttcaatacaaaaatgcagtagttaaaaagcagacataaaaaagacatatagaaaacaaataacaaaaggacttacatcaatactaccttctcgataagtacattagctataggttgattaaacattctaatcaaaaggcacagacagggagaatggttttttttttttttaatgtgatccaactgtatgctttctacaagacacacactttaggttcaaagacacaaataggccaaaagaaaataatgaaaaatggtataatattcaaacaataaccaaaaaagggttaaagtggctatattaatacaagaaaaaatagactttatgacaaaaattattactagagacagaggaaaacattttcttatgataaaataattaatccactaaagatatacaacaattcggccaggtgtggtggctcacgcctgtaatcccagcactttgggaggctgaggtaggctgatcagttgagaccaggagtttgaaaccagcctggtcagcatggcacaatcctatctctactaaaaatacaaaaaaaaatacaaaaattagccaggcgtggtggcacatgcctgtaatcctagctactagggaggctgagacatgagaatcacttgaacccagaagatagaggttacagtgaaccaaaatcacaccactgcactccagccttggtgacatagcatgattctgtctcaaatacataaaacaattatatatgcaactaacaacagagtcccaaaatacatgaagcaaaaactgacacaatggaaggaagaaacagatgattcaataataattggagacttcagtatctctctttcaacaatacatagaacaactagacagatcagaaagaaaatggaagacttgaacagcactagataccaactagacctaacagaatactccacccaaaaagagcagaatatacattcttctcaaactcacatacaatattcttcagaatagaccacgttagatccaaaaaatctcaatatatttaaaataattgaagcttcacaagtatgttctcaattacagtgaaatagaattagaaatcagtaactaaaggcaattttgaaaatttacaaatacgtggaaactgaagaacacactacctaataaccaatcattcaaagaataaatacaaaagaaattagaaagtgctttaaggtgaatgaaaatgacactacaacagatcaaaacttaagaaatgctgctaaaatagtgcttttgggaaaactatctagaaatgcctatattgaaaaaaaatctcaaatcaataatctattcttccaccaaaagaaactagaaaaaaagaaaactaaactaaacccaaagtaagaagaaggaaggaaataattaaattaaagaagaaataaatgaaatagaacataggaaaataatacaggaaatcaacaaaaccaaaagttggttttttgagaagttcaacaaaattgacaaacttttatttagaataacgaagaaggaagtaatattcatgttactaaaattaagaatacaagaagggacattaatacaccttacagaagtgaaaaggattatatgccgataaattagagaatctaaatgaaatggacaaactcctagaaagaatcacactatcaaaactgacttaaaaaatacatacagaatttgaacacatctataacaaagagattgaactacctccaaagaaaagcagtagcttcactggtgaattctagtcaatacttaaagaagaattaacatcaatcttccaaaaattaaagagcagataatacttctcaaatcatcctatgaggctgtgttaccctgatactaaactagacaaagctatcatgacaaaacaaactgcagactaatatttcctatgaatatagatgcaaaaattttcaatgaaatcctagcaaacagaatctatcaacatagaaaaaggattacacatcatgatcaagtagaatttatcccacaaatgcaagactgtgtgatatatgatcaatatactaatgcaactgtatttctaaatagtagcaatgaacaatccaaaaacaattcaattaatgatagcaacaaaaacaataaaataattaggaataaatttaataaaagaagtgcatgatttgtacactgaaaatgacaaaacatcactgaaagaaaataaagaagacctaaataaatgaaaagtatcctgtgttcatggattgaaagatttatgtttcctaagatggcagtactctccaaattggtctacaaattcaatgcaatctctatcaaaagcaaagctggctttttttttttttttataaaatattaacaaacgaatcctaaaactcttatgagattgcagaggacccagaataatcaaatcaatcaataatcaaaacaatcttgaaaaaaaaaaacaaagttgaaggattcacatttcttaatttcaaaacttactataaagctacagtaatcaagactgcagtactagtacaagaatagacatatatatatatggaatagaactgagacacaaagaataactataggtatagtcgaaaatttttcacaaggataccaagacaattaatggggcaaggatcatcttttcaacaaatggtattgaaacaactgaatatccatgtggaaaagaatgaaattggatccctacctcacatcatacataaaaattaactcaaaatggatcagacacctaaatatatgagctgaaactcatagaagaaaccttaaatataaatcttatgactgtggattagatttagatgtagatttgtttttagatatgacaacaaacatacaaacaacaaaagataaaaatagataaatttggctctgaagcacaaaccaaaattgtttgtgcttcaaaggatactataaagaagtgagaaaggaatacacagaatgggagaaaatattgcaaaatatatatcaggaagggacttttatccagaatatatagataattattacaattcaatgataaaagacacctcattttttaaaacacggcaaagaatttgaatagatatatatacaaatggctaataagcacctgaaaagatgttcaacatcattagtcattagataaatgcaaattaataccacaatgagataccactttgcacccactgggatggctgtaatgagaaagacagatgataacaagtgttgacaatgatgtggagaaattggaacactcacacacttctggtgggaatgcaaaatggcacagctgctatggaggaatgtctggaaatgcctcaaaagattaatagtagccaaaaagtagaaacaacctaaatgtctatcaattgatgaatggataagcaatatttgaagtattcatacaatgaaatgttattcagtcatacaaatgaatgaagtactgatacattctacaacatgggtaaaacttgaaactaatgctaactgaaaaaaagccagaaaccaaaggtcacatattgtatggttttatgtatacgaaatgtctaagattggcaaatccataaagacataaaatagattactaattgccatggacttggggaaaggaagaatgcaaaatgactgttaatgagaacaaagtttccttttgggatgatgaaaatatcttgaattagattgcagtcaatggcaatatgctgaaaaccactgtattgaacacttgaagggtgaattttatggtatgtgaattatatctcgataaaacgtttgatgagctaataaactggaaagaatcttagactgtgaggaatatacaatcatacaattacaaatgcttgttattagcatcaggaacttctttgaaattaccagttaaatatttgcttgcatagaccacttgtggatagaattttgtgtatttatgatctatgcaggcaaatatttaattggtaatttgtaaaagatcctagtgctaataatgggctgtgtgtctaagtggcatgtgagggcaaatagctttaatttttaaaaactactcaagaaatacatgtctgttggagtataaaatggtacaatctttttttgtcaatttcttataaaattaaacaatttatatatgccttatgatccagaaatttccataaatatttacccaaaagaaatgaaggattatgtccacaaaaagacttgtacaagaatattcacaaaaaccttaggaaaaatagcttcaaactggaaataatccacaagtccaacaacaagaccataggcaaagaaattgatggcatattcatgcagtagaatatgatacagcagtaaacaatgaactactcatgacaataaaattttatttcatcaacattattttgaataaaagaagccatatctaatatagtacacactgtatgggaacaagctataataatttatgatgatggaagtcagaaagtggtggtctctgggggagaaggtaattgaatggaaagaagcataagctaactttctggagtgaaaaaaaaatgtttttatcttattttaggtagtggtaatgtgattgtatagaataatccaaacttgccaaccaagcgccatgatctaagacttttttattgcatgaaatttatatctcaaagccaaagtgttacaagattataactttttttaatctcagataattctgatgtgcaaccacatttaggaaacactcatttaaactaaaaaatctttttccttaaggtcaagaataacttgtgtaggaatttctattcatcaacaattttttgtacttcaaggctatagtagcaggctcttgatagaatcatccttagcagcctaagaaaacgctgttttaaagaattaagaggtatatttaatttattttataattacaaatccagctctcttctaaatctttaatttcaatcatctggctcctcaggcaaaagcctgactaaactttgtacctatgtgattactgtaaaatttctaatacagacagagaattcggttccaagatatgattgatattttggggagcacactgtcacagtcctgtgttatgactattgtaggtgcacatagaatagaacatgaggtttatgtttacaagcttggcagaagagaacatcaaagtgtttcagataaagctgaaggtcacatttactttacagagaagctggtggtaccatgtgtgtacagaaaatcccactctacattagaaagcatccaatgccagaaaaaccttgttactagaggctcacagatgacctcacacatctcaaagttacccttaaaaggggagagattgaaaagttgctgataaaaacacatcccagagagatgaggactacacaccaagagaatgcaaagccaactccagagctcaaagtgacaacctggaccaagaacattgacaaactgaaatgcagaacccccaaatttaagaaggaagatgcaacactccagtaaactgtgagacattgacatttgctaatcccagaagcaattaactagacacttccactcttggttttccaccacttaaaaaaagaaatagaaagaaggttcatgcatgagtccttggtattgcaatcactgaatcacattaattaataaagtttgtaaagatggtggtcatttttaaaaataaaactgttaatacctttaattgagtgcataccatgtggtaggcacagagaaagccctcaacatatgctagatattatcattgaaaggggtttagtgggtgcatagatggtactcagtagtatatttcttctgcatttttcttttgtcccttcctctcctgtggtaagataaaatggtcacaaattccttgcagctgttcccattaaatggtagaatcaattctgttacaacttaaccctgatctggccttttaacttgctttgatgtcacacagcttctgtgtttagatctcaagtggtctttcagtggctgctcttggtcctttggaatgctgctaccatgggaagaagcccaagatagtctgttggagacatgtggcccagctgcaagccagcaataaccagccaaaaatgcgagagaggtcatcttagacattccagccccagttgagccttaagatgactgcagccaacagagtggcctcaggcaagaccaccagaagaaccacttgaacgaacacagcccagatggctggcccacagaataactgttatcttaggccactaagttttggggtggtttattacgcagcaatagaaaactaataacatttctccttccttgttcaataccaagtgagtcaccagatgattcaaacttattagaaagagttgagttctaagagtgaggacaatgggagatgccagaattttctgaaaggagagattcaattgcctcatgacagttctggtagagctccttccactgggggaatagatggatgcatttgcttagttgtcttaacaaccaagttaaattcccagctcagtaacttccatcaataactctgcaattgtgtattatcccaaatgaaaaacaaaatgcaaaactgaatggaaaccaatcaatttaacctcaccgatagacataacatatagataacagcagcttaaagagcaaaatgtcaaagtgcctcttagcatcatagaaaatttgtactgtgcaattttcatgttaaccaattaaaaactcaagcccaattatgcctaaatcaatcagttgcctgatccaataataacaatagtctcatttatcaagatttactatgtatcaggcaccacctaaatggtttatatgtgattactcctcccaactaactataagatgaaggttctttttttgtccatcttaaagatagacagggaaaccaagatgtccatttaacttacctcccaagctcttacaactaatcactggcttaagttaaatacaaacaattagattctttaactagagttcttgacctcttctaaatgctttgacctatggatccagaactgaggctttcagcttattgggcagtaaaaataaagctcagactataccctctatagatgtgcttggaaagatactcaggggcagcccttctacctttgtctgttaaatactcaagcctaaagacaatcattttgctccactatacaaatgggttgttgatgaatctctgcctctaatactcctgacctggctagagagacagaggttgaaacatgaaagaggaagccctcaaaaaacagtgtgcaagctcacaggagacccactccacaaaatgagacccaaatctacccagtggatgctcctggaggctctgagtagataatgatttccctctggtcctggttctttaagaacttgagggacaccacttccagagcagtggttcttaatcttggctgaacattaaaattacctagggatttaactgactcagtctttttaataattcgtcattaacatgttcaactttccactccaggtgatgtcctaggccatagtctatgtattggtcgcccattcgttgagaacctacttttgatattataagctctgtccttggatgtaaagaaaaaatgtagcagaaaacatggacatctctttatttatgatatgtcctagaaaagatgcacatttgtgtagcagtagctgtgggatttatcaagcaatgtattcctcaaaaccagacaagacctgtcttcttacatctcgacctgcagctacatataatgtgtgcttggtttaaagaagtacaaagtccatattctgtcaagaaacctgtcattcattactcccactgagaactgatggtcattctgtagactatatctcaaaaatattgtctgcatctagctctaactacatctcctggcatgtattcacaacccccaggaacagttttctccagaccaaacaaatagaagttctgcatttcaccatcgccagaactagaaacaaaacctcacaactatacaagcacctaatacatagttgggttagcaaccatatatcccatatatttttattcgtcatggtagacacttaagctctagttaaggggcactaacgctccagtcaagatctattgccttgcagtcattgttcttgccaagactctccatctggtaccctaacatgtctaatgcctgagatttaggatggtacatggcatttatggccatatgtgaaataataaaccagagtgttttctccatgtgccatcctaccacacagtgcccagaacatagtagacactccacaaatatttattgaattaaatagtggtgactgaccacaccactcacctcttcacaagccaaaattatgttgcaatcaccaagtttctggacactggaatggttccagacagtttctagaattaactgtccctacctagagttcccaggttcagtcctccagagattctcccattatttcagtctgcgagccccaatccatattgtgatttcaccaaaacttcttttatttttcaaaaggcaataccaatgccacctttttatcttcataaagaagctgaaaaaaataaaccacactttagaatgtcccatcataattactactcaccactggatattgatgtcatcctcaaccatcacccagtcaccagcttgctcttagtcttcccaacacagatcaattgtcttatgtagagaagtttcattgcctcgattttaaaaatgaattcaggaatgttaaggatactttcaaaaaccactctactagtctgtgataggatcagacctagactcctgatctaaaaattccattggcaatatcatgatcacttttcatgatcacttgggaagtgttaaaaattaaaatatgtgagtgggaaaaagccacatatatggtgggttcagttgttatctccccttccatcttagaagaatattattaactattagctctcgtaagtatagcaagacattggctatctcatagttttttctcttatagaaaggagaaaagaatgctaaagtaaagtatccagcctgagtaaagagaatgaacaagtccaaaatagaaatgatccatttaatattttaccatggagatccttcttttttctcttatttcactggtgaatattttattgaatgcctaacatatgccagcccaattattatatatgtatattggatatgtgtccccatttttaccctcaaaatagccaataccctcataattaatgattaatgatgctatcattaatcaatcctatatatgaggaaactgaagcatggcatagattgtttagctaacttcctaaaagtaatgctgcaaattaatgttgaaatttggattcaaattcaggccatctgggtccagagaagtgctttatgctgatactacttcatcatatcatatgcagtacaggccaaggtagatgaattttaagagacaagatacattatttcccctgaatgtattttgtgctggcaacacagtcaaatatgagatttccaaagtttcatagccctcagacatgaatcgtggtggcttccatctgacagagcagattgcactatcttccagaaatacagtctgtaacaggtttcctggagaacaggataggaaccacagatgccccatctgcttcctgctgcccatttggaatacatccaacttgtgtcatcttatttcatgaactttttcagcttggactatgtctaggtgcccattctctcccaaaatcagtcccagaccctaccagacacataagactttctactactcatttcctgtcactgtcaagcttcactgctgaaaccagagttatttctattgttatttgctaaatatttctcttggtgacaaatggcatatttctgaagggcaatcctataaaataagttagagattatcttgggaaccccatgagggttaagcatgatgtggtagattgaaaaaatggccacaattttgtggttcctcccatcaagggctggaatttatttctctgtccctttaatctgggttgtccatgtgacacactttggaaaaatgggacattagcaaatgtgacacaaactgaaaactaaagagtgtacattgaggcttgtcttctctggttgtgcttgaaatcttgagaccaccatgtaaatgcgcttttgctagcctgatgacataagaaaccacctagaggaaaacctggccaccccagccaatagccaccaaactgtcagacatgtgagtgagtccatcctagatccaccactgtcagatgcccacaagctgaccacagatgcttcacagagcccagcagagaccagaccagctggcccaattcagaagaacatcccagccaagccacagaattatgggctaaataaaatgtttgctattttaagccactaagtcctgggatggttgtttttacagcaaaagctgatacacatggcaagccatagtaaggtagtttgaaagaaaaaaagcgggacttctggcttctggttcagcatgtaaagagcttggaagtcaccactccatcctaacaacaagctaaaagctgaacaaattgcaaatgaacagctcttcttgcattcataagagaggtgaggacacaaggcaaactgttccccccacgtttggagagacaggcaaacacaggacgtcacagctcctagggcaaagagccatgagcagagaccaccatgagaaccagtgctggggtaggaaaatctgaactgtaattgatgaatggctggaggctcagcatagacaagtctgagagataaaaactccaggggatccagtcataggggaacctccacattttggtgagttttacttccaagagtttggccaggttcttgcagtaaacatcagagaaatttttttttcatgcttctgacaaggggagggtaaaaggaatgattttaaaatacactggaatacggttcttctgggaaggcttgcctccaggagaaactatttaactagagcctaaaatgctggggtattatcaaagcctaactgacttggggaaagagaaatatccaaacccacccagctctatccaccctctcccacctaagtggggaggaaaaagggttcacagtccagaggcacagactcactaaatgactgaggcttactctcaagactgcaggatgcttcccctcccctcacatcttaccaccacattattaaaggttgatttacaacagttacttttactagatacatcatgtccagctatgaagaagaaattacacggcatactaaaggtaaatatatatatacacatatatataatatatattatatatattatacatacattattatatattatacatacataatatatatgtattatacatatataatatattatatattatacatgtattatatataatattatatataatatattatatttttatatatatacacacacatatatattatatatatatgtatatatacacaatttgaagaagacagaggtcacatcaaaaccagacatggcagggatgctagaattatgagactagcagtttgaaacaactatgattaatatgccaaaggctctaatagataaagtagacagcatgtaagaacagatgggcaatgtgagtagagagatgaaatcctaaaaaaaaaaaaaaatgaaatgctaaagatcaaaaatactgtaacagaaatgaagaatgtctttgatgctcttattagtacacgagtgcggctgaagaaagaatttctgagcttgatatatcaagagaaaccttcaaaactgaaaagcaaagagaataaaatttgaaaaagaacaaaatgtcaaaggactgtgggacaactacaaaaggcataacatacacataggggaattccagaagaagaaagagagggaatatttgaaacaataatgactgagggtttctccaaattaatgtcagacaccaaatcaaaaatcagaaaacctaaaaggacaccaagcagtataaatgccacaaaacctaaacttgggaatatcattttgaaagtagaaaatcaaagataaagagaaaattctgaaagaagtgaaaagaaaaaaacatcttacatatagaggaatagaaataaaatttacattgaactaatcctcaaaagccacacaggcaaaaagaaaatggagtgacgtgtttaaggtattaaaaaagaaaaccaccaacctagatagaactttgcgtcctaaaaaattatccttaaaaggtgaaggagaaataaaacctttctcagataaacaaaaactgagaaaatttgttgccacttaatcttgcctcacaagaaatgttaagaaaattctttagagaaaaggaaaacaatatagatcagaaacttagatctacataaagaaagaacatcaaagaatacacgaaggtaaaattagaacttttattttccatatatataattttgagacagagtttcactcttgtttcccaggctggagtgcaatggcacaatcttggctcaccacaacctctgcctcctgggttcaagcggttctcctgtctcaggctccctagtagctgggattacaggcatgtaccaccatgccctgctaattttgtatttttatttagtatatatatatatatacactaagaggcatatatatacttacgtatgcttatatataagtgaaggaatgacaataatgttaaaatgaagagaaaaataatattatttttgtttctgttttgttttgagacagggtctcattctgtcaccaaggctggagtagagtggtgtgatctcaggtcactgcaaactccaccttctgggctcaggtgatgttcccacctcaccctcccaagtagctgggactacaggtgcacaccaccacacctggctaatttttatgtattttttgtagagatggggttttgccatgttgcctggtctcgaactcgtggactcaagcgatccacctgcctcagcctctgaaagtctgggactacaggctattttgttattaaaaggaactcacactttctttgaagtggtataattttatttgagagtgtgtttggattagtagtaaatgtgtattgcaaactctagagtaaccacttaaaaaaggttaaaaaaagaaatattactgatatgacaaaggaaacaatgaatcatgtgaaatacttagtaccacaaaggcagaaaaaaagagttgaggacaaaagtagaaacaaagggcaaggtcaccaaatagaagacagtagcaagtacactagatattaattcaactataccaatgatgagtttgaacatcaatggtctaaattcagcaattaaaagagagattgccaaagtgaattaaaaaacaagacctatctctgtgttgtccataaaaaacctactttaaatatagacacattaagattaaaagtaaattgagaaaaatataccatgctaacactgatccaataaaagcaagagcagctatattaatttcagacagagtagactttaaagcaaggaaagttatcatgtataaagagggcattatataatgataaagggatcaattcttcaagaagacaaaacagtctttaatgtgtatgcacctaacaacagagcatcaaactactacaggcaaaaattgattgaactgcaaaaagaaatagataaatccactattattggagatttcaacacttctctgtcagaaatgggcagattcaggagacagaaaatcagtaagaacatgtttgaactcaaaaacgccatcaatcaacttatatgcttgtcacctacaaaatacttcatctaatgatggcagaatacacattcttttcaagatgacatggaacattcaccaagataaaccacattctgggccataaaacacaccataacaaatcttaaaaaatagaaatcctataacgtctactctcagaccgcaatgaaattaaattcaaaattaacaacagaaagataactggaaaatccccaaatgcatggaagataacacaattctaaataacatataagccaactaacctcaagagaaattaaaacatattttgaattaaatgaaaatagaaacacagcttataaaatttgtgtgatgcagtaaaatcagtgcttagagggaagcaatatctattgatacatatttaaaaagaagaaaaatttaaaatcaataatttaagttttcattttagaaaactagataaacaagagcaaattaatctaaagcaagcagaagaaaagatataataaagcagaaatcaataaaattgaaagcaggaaattaattcagaaaaatctatgaaaacaaaagatgattatttttaaaagattataaaatgaacaagcctttagtcaagctaagacaaaaaagagaggggacacaaattactaatatcataaatgaaagaagaaacattactgtggatcccatggacattaaaagactaataaaggaatattatgaacaattctatgatttagatttgagaacctaggtgaaatgaatcaattatctgaaaaacacagtctgccaaaacccacacaagaagaaatacacaggctgggtgctgtggcttatgtctgtaatcccagcattttggaaggctgaggcaggaggatcgtttgaacccaggagtctgagatcagcctcggcaacacagggagactccgtaactcatacgagaagaaatatacaggctgggtgctgtggcttatgcctgtaatcccagcactttggaaggctgaggcaggagaattgcttggacccaggagtctgagaccagccccggcaacacagggagaccctgtctctacaaaaaatatttaaaaattagctgggcatggtggcacatgcctatggtcccagctactagagaggctaagaaagaaggattgtttgatccagggaggtcaagtcttcagtgagccatgatctgcactgtagcctgggcaacagagcaagaccgtgtcttgaaagaaagagacaagggaaagaagggaagaagaaagaaagaaagaaaaaagaaagaaagaaagaaagaaagaaagaaaggagggagggagggagggaaggaaggaaggaagagaaagaaaagaaagaaaagaaaacaaagagaaagaaagaaggaaggaaggaaggaaaggaaggaaggaaagaaagagaaagaaggaaggaagaaaggaaacagagagaaaaaagagagagagaaagaaaggggagagaaagagagaaagggagggatggagggagagagggagggaaagaagagagagagagaaagaaacaatctaaacaggtctatatatgttaaagaaattattagaatcaataattaataacctttcaaaacagaaaacaccaggtccacatggttttactggtgaattccaccaaacatttaaggaagaaattataccaattctctataatctttttagaggatagaagcagaaaagatacttcctaacttcttctatgaagccagcattgccccaataccaacagcagaaaaacacattataagaaaagaaaactacagaccaatatctcttatgaatacataagaaatgtgtaaaaattctcaacaaaatattagtgaattgaactcaacaatatatataaagagttatacagcacaagaaaatgacactcatcccagctgtgcaaaactggttgaaaaatcaaaattaattaatgtaatccatcacatcaacaggctaaaaaattacatgaatatatcaatagatgcagagaaagtatttggcaaaatccaacaggtatttatagtaaaaactcacagtaaactaagaataaaggcgaactttcccaagttaataaagaatatctatttttaaaaaattacatctaacatcataacagtgagaaactaaaagcttttccattcagatcaggacaaggcaagtatatttcctctcaaaattcctttgcaaaattgtactggaagtcctagctaatgcaataagacaagaaaatgaaataaattgtatacagattagaaaggaagaaataaaactgtcttttcttacagatgacatgatggtctatgtagaaaatctaaaagaatcaacaaaacagcttcccagaatgaataactgataataccaaggtttctgaatacaaagttaatatacaaaagtaaattgctttccaatacattagcaatgaacaagtggaaactggcattaaaaacacaatactatttgcgttagcaacccctacaatgaaatacttaggtgcatatataacaaaatatgtacaagatctctatgagggaaactacaaaacactaatgaaggaaatcaaagaactaagtagaaatattccatgtttatggatagaaagactcaaacctggtaagttgtcatttcttcacagcttgatctatagagtcaatgcaatccccatcaaaatcccagcaagttgttttatgaatatcaacaaactgattctaaagtttatatggaaagaacaaagaccccaaataaccaacacaatatggaagaagaacagaggactaccactgtccaacttcaagattactataaagctacaacaatcaagacagtgtaatattggtaaaataatagacaaatagatcaacagcacagaatagagagctcagaaaaatagacccacataaatatggtcaaatgatctttgacaaagaagcaaagacaatacagtgaagcaaagatagtcttttcaacaaatggtgtgggaacaactggacattctcatgcaaaaaaaaaaaagaaagaaaaataatctagacacaaccattatacttcttataaaaactaactcaaaatggatattagaaccaaattcaacatgtaaaactattaaacccctggagataacaggagaaaaatctagataacctggggtgtggcaatgactatttatatacaccaaaggcacaatccacaaaggaaataattgataagctaggcttccttaaaattagaaactactgttctgtgaaaggtagtgtcaagggaatgagaagacaagccacagactggaaggatattttgcatatgttccacatcatacggcttcaagaaaatgcaaattaaaataacaatgacataccactacacatctattagaatggccaaaatatagaacactgaccacacgaaattctggtgagaatgtggagcaataggaacttacattcactgttagtgagaatgtaaaataacacagccactatggaagacaatttgacagttttttacaaaaataaacatattcttaccctgtgaccctcctttttggtatttacccaaggaaattgaaaacttatgtccacttaaaaatctacacgcaaatgtttatagcagctttattcataattgccaaaacttgtaagtaagcaagatgtcattcagtaggtgaatggataaataaactgtgatacattcagacaatggaatattattcagtgctaaaaagagaggagctgtcaagccatgaaaatacatggaagaatcttacatgcatattactaagtgaaagaagccagtctaaaaaggctacatactgtacgattccaactacatgacattctggaaaaggcaaaactatggagacagtaaaaaatatcagtggctgtcaggggttgtggggcagatgaataaaagaataacagagcatttttagaacagaaaaacacactgtataatactatatttgtggatatttgtcattattcatttgtctaaactcctatgggttagaatagaaagtacatccaagaataaaccttaaactatggactttggatgataatgtgtcaatgttggttcactgcttgtaacaaatgtaccactctagtggaggatgttcataatgggggaggctatggatgtgtatttacttatacatggctagagtatgaagctatacatgcatatatacctaggcataggtatatgggaaatctctataccttcctctcaattttgctgcaagcctacaactgctctaaaaaaagtcttaaaaatgtgaatagtttaaatcacatcaatttaaacaaactgcaagatataagaatgtagggaattgtttttctccacacctggatctagtaaaaatgcagacagtacatttccaaagcaaaatgataaaataatgggaaatttcagagaacagggctttctttaaaagaaaaaagtggtattttctgaaataaacagagcaagaccctatatgcattttgcacattgtcaaaaggtcacctcacacattctggacaacaacacagagctttatataacccactggaccttgcccatatgaagtacagaagaaaactttcctgcttaatcatggaaaccttgcatattctgtttagttattctcactgtcaaaagaatcccatcttcattcattaaatcattccgcaaatacatattagcacatgttgtttgttagttgttttttttttaatttttttgagatggagtctcgctcttgttgcccaggctggggggcaatggcatgatcttggctcactgcaacctccgcctcctgggttcaagcgattctcctgccttaggctcctgagtagctgggattagaggtgcctgccaccatgcccagctaatttttgtatttttagtagagacggggttacaccatgttggccaggctggtctcaaactcctgacctcaggtgatccacccgcctcagcctcccaaagtgctgggattacaggcgcatgttatgtgttaaagctctgtcctcaatgctaaagcaaagccaatcatggttcttaccctaacggagcttatgttctggtaggtaaagtgggcattaaataaatagattgataaataagaaatgcatgtaacaagtgccacacaggttattatacaaatctaaaattagaaaacttggcttcatcagagaggctgtgaaagccttccctttgtaaaagcatgcttgagctgatatttctaggatgtgtggcattaagcctacaacttgaagagcaaacacatatctggttagaaagatgaacaaatgcaaaggtcctacattgagagagaaagagaaaatgagtgaggatgaggggctaaaaaaagaccaggatgcctgtgtcgccatgagatgaaggctacaactcaagaaaagtttagagaatagccatggccttcaacctacgtaggagaggtctcaaacacacactggctttcaaccggccgcatttctctccctgtggcaagaaacttctggagctaaagagatgatgccttctcatgcttccctctttctagagtccatgcttccctctttctagaacattctccaggtacaagatacacagaattccttcttcaaagtatccctaccctgcttccaaagcctgagtgacccctttctcagctcaatcctcctaaacattgaccatcctacttggtaggtacccttgggcctgagaagtgatgagctgtgggcaaatgttgaatgggtaagtagaatgtctattcatgattaaggcttctttggtaagttgtggtgtgaaactacaaggattccaggaattcttaaggaaatctggctctccagatcattgtgaagttatatttgtcaagatagaaggatggaatatatcttaacagctagattgatttattatttttaaatatttaggcatagggcatatgggcctccatgtctattcttacccagggacccacaaatgtgcaggtttgctaaacaggtaggttgctgctgaagaacacagagccttgcagtaagtatttcccaaactttaacatacctatgaattacctggagatcttgtgaaaatgcaagcactgatatctccattcttaacaagttccccagagatgcccatattgcttgtgtagggaccacactttaagtagcaaggctgtagggcatgttagggagttttatttttatctaattttatccaaacagccattagaagttcttgagggatttcaagggacagattttcagtttgaaaagagtacaatagttgaggtgtgaagtatagattaagtgcagaggaatatgctgacaacactgggcaggagagaaagtaaacacatttggagatatttagagggtaagatctgcagggctcagtggattggatgcaggaagaagtggtatgacctcaggaagtacaaagttcaaagaagtgagtgggtaaatatataaattaaataattccttctctgtcattctctcaactgaggtttcggcatagcaagacttgggacagtttcagtcgtggattatttaagagaattaagaggcttttttctgcccccccgtagatagtcggaagccatatttaaccaaattacatttaaccttcctcttctttttcctcagagagctaaaataatagaagtgacagcagttgtaattatacccatctcaattcacctgcattccttctgcatgtagtaaggtcatctgagcagtttcttcctttaattaagtggttgtgaccttcacaagttcttctcaaaatgatttctccagtacccaagtgattaaacatagaactctgttccccctactcttgacagcctgagagcccaagcgtcctacaggaaaatgctttctccttggggactggctctcgagaggcttgcttccatacaggctgggctcttggaaatgtttcctgactgcagagggactttcactctgtttggtaagttggaacaggattcaaggtcctgctgagctaatcactcagctgcaccagctgcagaggcacactgtcccgtgggagtcggtgcctccagggaacttaccgctttcttcagcagaggatgccaacaatgggtttgctgctcctctaattccacccctatccagccttctgctgtgactcacaaaaggcaaaagaagcaatacttggaggagcctccagcctaaatttaggcaaggtgtctcagttctcataaatacccaaggaaaattttaaattcaatgcgcagcactcttagcctcgtgtatcacttctcattttcacactgggtaagcttgatttgcatacatttcaagagcatctttctctttttttatctttatttattgtcctgtcctcgtcctacttgctgctttggaactctgtatcaaatatttatatatctttatttcctagctgtaacccacttcatcattcccttccagagagctttatacttcacaaaacctgcttcctcccacaacccccaagcacacccacttccttctccccctacagccacagtacaaaactgccagactcaagtttaattcaggggagtccttgtttctccctcattctctaataacctcagaagaaggcattttttgcttcatcctcagcatctgctttgcctggtgatgatgattaatagacaggcccaggtgcctggtgcccaaggcgcctaatttagtgtcgatcctgcaggggcagagcatcaagaatgacacaggcctggtaatgcagtaagaatctagagcctgtggctggctggagagcacatgtcccactgctaggggacagccacttctcaggtccagttattcccacagctttcagtttttcactggacattgaaatccaattttaatgtgaaatctccagatcttcatcttttggttcaattaagaaaaaatcataaagtgctcaaatagcacatcagcaagccagcagtttatgtactctggtttgtagttgtcgtggcacgaagcagttcacagacacattcccattcaaaggtatttggaaacacattgtatgtgctgtcctggcactttttttaaaaatttttttaagttctggtgtacatgtgccggatgtccaagtttgtcacacaggtaaacgtgtgccatggtggtttgctacacctatcaacccatcacctaggtattaagcctagcatgcattagctcttttagctagtgctctccctacctccccaaacgggctccaatgttgtttgttcccctccctgtgtccatgtgttctcattgttcagctcccacttttaagtgagaaaatgcggtgtttggttttctgttcctgtgttagtttgctgaggataatggcttccagcttcatccatgtccctgcaaaggacatgatctcattcctttttatggctgtatagtattccatggtgtatatgtaccacattttctttatccagtctatcattgatggacatttgggtaagttagttcaaccattgtggaagtcagtgtggtgattcctcaaagatttggaaccagaaataccatttgacccaacaatcccattactggttataatatgaatataaattacccatttatattacccaaaagaatataaataattctcctggcacttctcactcataagtgctctggacattaaaagggagagtaattaaaagatcctaacctgactataactaggcaaacttgaggcctgtctttgcatccagcaacaacaataataaaactctgccttttaaaacttgaagaataatcgttctttattctagatttccttaaaggggtagcacaagggcattaccaaggtcatagaattcttttgaaaattcatctttagacatctctttttcttcccagagtttctcactctgcagctgctaagcatcatcccatctctcttgctgcctcaatggtcctataacattcattcacctcttttacatccctctgctcagtacatgactctcctatttgggggaaaatacactgctttttttttctcaaatacataagccctcctgccctggaattgtagcaagaaaaaccatccacctaaaagtaacagttatgctcattatcctggtattcggatatttccccacataacaatagaatctctaaagactttatcatcatcttgcaatatttgatcatcacttgaagtccgacagagtattggccgtgatcatgaccaatacccagggaatctttcgggacttgagctcattcttaaagctagtttgctaataattagttgtctaatgattaagttatccaacatttaatccttctctgaatcctttccattatctatctttttctgaaatctacttggctttttaataatttttaagcacatttgcctagggcacttctgaattatctttatattttaaatatcaaatttccactcttctgtaaatctgtccttgtggtgtcttttgctattttatgtccatttcaacactttaaggacatttagccaacttgtctgaaaactttttattttttattaattgatactttagggtcacaaaggtttggattctagacgatctccacatgaagcaatacactgtggaactttctacactgccaggggcacagtgagtactctgctgtgatggcctcaccaatgtctgtccagatagcccctggggtcacaggcatctctgaggttctctctacagaaaggaatctcttctcatttaaagagggtccccatcctgtaacctgaatcacccaaagttctccctgggaccttcttgtctgttgtgggtaccttactcctacctaccaaaatagcctagtccctgacccccaggatgcaaaacatccatattgatcatggatttcattcccacctcagtcatttagtagctgatgtctttggataagaacctaacctctctgaacatctggtacataggttgcaccacccttattaagaagaatcacaattactctcgtaagtttatgtaggaatagaaacaaatctatggattgtctggatgcctagaaggcattcgataaggaaggaggaagagtgaaaggaagggggggcattttattttcctacagacgacaacatctgagcaacagaataggcagaaagatgctgtctaagatttagaaaaaactacatcatatcaactgggccttagctttattgaaaaataaaaacaacaaccaactattctttgacttctttgaaaatagccccccagaaaaatctatgaaagcaatctataaagtgttagttctagctgaattaaaattgtatggggaaagaaatcaacctttaaccttgtccattatagcagtagatctctatgctccacaatccaactccttggaagtatttttggcaatggtcttatccagaaaattcactgaattactgagtccaggttatgagtgtttatgctctttccggatttctttagccaacctccctgacccaaacaataaattaccattttcatctgcacttgcctcgggcagcacctctttattaaaagattaacaaataaataaatgagatgcaattagccagaagcaactgtatgagacttttatctctaatgggatagaaattgaaggcaaaaatagagaatattgatgacaaaatatttgaatcttgtgctcttttcagggatctataaagcatgtgtctggtaacacagagaggaaaatatgttggggacagggatgatatgttcattctaagctgcctttagatgtactagcaccatctgacccccccatagactcttagaaatgcaacatttgaagtgtgggttcttctccccacctacccctaaagctgagtgtttctcattttccccttaaaggaggaagcacattgtcattatcatctttcccattcttcactctggagttcaacttatttcagaataaaattgtcacctgtcattggatatgaccagtgactgctaagtttatcacaacacccagttcaacttccataaaatcacatcctcctttcctaagccagaagcatccaagagctctcagctacgatgctgcagggaagacgcctacttgaagtagaaatgtgtcagtccttcatgtaaaagcacaggcaactgatgcttgtcagtttacagctgatgacagcaggtggagaagaaaccatcttagctagagactaagagcctatgatcctggctgaacttttccactaactagatgtgtgaccctgcacaagttaccctccatttaatttcctcctctccaaagtcaaggcctgtgcatgaagattcaaaggtcccttccagcttcacggtgccccttagtctgcccacccaccaaagcccctcaggctcaagaaagtcagcagggtctagctcccttcatggcttgacccaaaacactttcttggtcttttgaaattaatgcagatgttttcatctttccaaattctttctttctcttatctgattaactttttccttatttcaaaagcagcatatgcttattgtaaaaatatcatacatacagataagcagaagagaaaagtcattcataatgccaagttccttcaaactgtgacatatatttagaagttcttcatactatctgtagtgttttccaactttataagccattgacatattgctccttctctttttattttatttgaaaacataattttaatggctacaattgccgtatcatatgattgtgccatgcatgaatcaatttatatatacatagttttttttttttgtgacagagtctcgctctgtcacccaggctggagtacagtggtaagatctaagctcactgcaacctctgcctcctgggttcaagtgattcttgtgcctcagcctcctgagtagctgggactactggcatgcactaccacatctggctaatttttgtatttttagtagagatggggtttcactgcgttggtcaggctggtcttgaactcctgacctcaagtaatctgccctcctcagcctccaaaagtgctgggattacaggcatgaactaccatgcccggctacatttgctaatttatattttttaattttgctatcattggtatcaccctgaactctcttctttcagggatatacctggttgctctaaagagtattggtagatgagggaagtgctcttactaactagtggcatttctttaaatggctgcaaatgcttagaaactcctccagttgagacgtagagtgtaattctccacctatttaatctggttgtatttatgactcacttgtaactaagacaataaggcaaagcaaagatgtgtgactactaagcctagatcaggaggctatgcagcttccacctgattatcacggaagacttgctctttggctgcttgttctcaatatacactttcttggaacccagctgccatgctgtgaggaagcccaagtcacatggaggtgctgtggttgactatccttcaggccaagcactggacatgagagcaaggaagccaacttggaagccccactcagctgtccaagatgtttaagtcaccccagcccatggagtctttaaagcctcagtcacaatggagcagagaagagtcttccactgccgttttcaaattcctggcccacacaatctgtgaacaaataaatgttgttgattcataccaccaaatttggatggttgggggcagcagtagtacctggaatgccacagactaaacctgccatgattagtaggtacaatgggaagcacattctaaagcagtgattcccaacacttttggccccagggactggtttcatggaagacaattattccacaggtgggggtgagaggaatggttttgggatgaaactgttccaccttagatcatcaggtatcagttagatttttataatgagcatgcaacctagatcccccatatgtgcagttcacaacagggttggcactcttatgggaatctaatgcctccactgatctgacaggaggtggagttcaggtggtaatgtcgcccactactcacctcctgccgtgcaacctggttcctgacacaccacacggactagtaccagtctgcagcccaggggtcagggacctctgttctaaaggacaatgttaggagaggaaggggaataaatgaatttatcttaacctgcagggaaaacaaaaagactggaagttctggaagtagcaacccccaaaggattctgttagtctcctatgtaaacctatcagcagcagcatcatcttttatgtttgcaaaaaaccaattatggatgcttaaaatatgactgtttctttgaaaagagtgtcttaccaaaaaattacaatgagttatgaaagaaaaatatttccagcatttgtatttggagtacagttgaggcttactctaaagggggcaattttgcaaagtggttcagagtaagagttttagaagcagattcacctgggttcaaactatggccctatgaccactttgccaattctggaaacatgcattccatcatctctgaaacagggagaaggcttcactcacaaggttgctgtaagcgctagcagacataatggatgtgctgtgttcacatggtgcctagtgcacagtagcgcttggtcacctgtcactgttcttattgtgttcttgttattgctcctgctattgctaaagttgtttcagcccagcccaggaagaagggtgattatttagttctgaaaaagagaaaacacaataaggaatatataatttcatttctcacccaaaggaccattttatgactctggtcattgcagtgtaggaaaggaataatgttcattgttaaagaaaaaacatcattcagtgacattggataaagcacagtaaggcagactttattcatgaccattgcaacaggtatagggaccatggtaaggggattttgcagtgagagagagagattaggctcaactctgaatacagcatgggcaagtgggaatttacagctaaggagcagggtggggatcgatggatgaaaatgacttagaggatgcatcaggagtaagggaaattctggccaaacgaacctacaggatttttataggtgatattggaggaggaggaacctgatcagatatcaaggctaatcagacagtgagagagaacgagcggttcttgctaaactgacttatcagggttcttgctaaaactgggttttacaaaaacatgtgcagatgagcctaggagaatgttccccaagaggctgactaaagtttaaccaagcaaagaatctttgttatcagcccatttagaatattagggcaaagccctaagaggtttacatttaagtcagaaaaccagaggacttgaatatactcactttttttactgcattgctgaggtctagatttcactcactcaatcagctattcatttagcagacatgtgtacttattaagtatcatgtatgctgggatccatagtaggcactgacaatacagaaaaattaaaaacaaacaggactctaaccctcccccttcatgttcaatctctgcagctcatatgcactgtgtcgtaagacattcacaattgcatagtaccctgaaaggggaaaaatgaaaaaaaaatttaagaaagttctaaaagtatgttacactttacaaagcccttttcacatttgtcatctcaatgagtcctctaaacaaccctggaaaagagatactattataattaaatcaattttatagataagaaaactgagacaagaaggctaagtagcatattcaagatcacacagctagtaagtgacaaagtatgatcttggaccctatcttctccatctgtgctgggtcagcgtgtgtcacttcaactccatcagacacatggcttttttgtactgtggcaaagatactgagctctcaccaaagctacccacactttgaagtctcccttagagtcaattagaatcacacgactaggactttgtcctgaagcaacatgagtacttctggggctaaagcagttggcagttgatttggctcctccatgaccctcttcctctttggaaaagagcctcaaagtgaaaggggcttggatacccaagtacctgcatggaggagagtctctgccaggccatctcagatctcacaccagagagaaaacaccttttgtgtgaagcctttgagatttcaggtcctacttgttaccacagcagagcctcttctacctaacaaacacaaacccaagacctctatacccagcaccatgctgggtgctgcgaacaactggaatcgtaagatattctctgccttcaaggagctaacaaagttactaggacattacttaaagtgaagggttttctcaacagatggccaggctcagccagcaatgtacgacccataaataccagtgacaggctcgttatcacatctgagaagagctgtagcctcaacactgtttggtggtggctgccatttttaagatgttgctgtgctgtaagctagaaggccagcgccaaacctgataaccacccagaacctggggcaatccttattacctcgataaataatgttttaatttattggttaaagaaaacacattaagaaaacatgtccctgtagccttgccgcttttcaggcccatcttttaacgtcttttctctactctgagaattcgttccttgattcattcacttactaaacatgtatcaaacatcaacacggtaccagtgctgtgttagagctggagatgcacagataaagaaatcatgattcctgcctgggaatcggcagtaactttttttttttttcagaacctagacctgaactcaggaggccttatgggatttataagatcagatcaccaactcagggtcacttagaaaggggtcttaagactcaagtcttaaggcataagtaaaagtccaccaatttttatgtctttgtgatttttttaaaatcaacgtactcttcaaggatgaactgtcagattttctaaggagaaaaaacaaacagcatattcctctgatttctcaactgcctggttccttcattttgacatttgagactcttgttgcaccacagactcaatagcatttatttagaatcccaaaagccaagaattagacctttgtttgacttggagcagttttctgtcttcctttctctgggtcaatcaatctcagcttctctagttttaaaagtacaacctataggaaacataatttccaaaaagagtaatttcataggattatatttcaaaatattatccctgttatatggagtaggcccggtatccatgaggtagcaatgtgttcctttgctaagccaaggagtccaatcccacatgctatggaactggcacaaagtcaaaaattttaatcctacttgctgtgaggttgttacacagggaaagttccttagtgaggcaggcatggctcagcctccaatgtgtataccagtggacttggtttctatcatataaacccattaagggtctgaagaagccatttacattttcagtgcttttttttttttttaattgatttctcagaggctctctctcagggaagctgccctcacctccctggccctctcatatatagtacaaagtgctccaccacagtagagaatgtgctgctgtgactccttgattcttaattaatttatcaaatggagcatctctgttgagtccctatgcttagaagaatagtgattagaacctagcaggaattcgaatgccttgtggcaccacagactcaatgttttttgaataaactcttttttgaataaactgttttttgaataaataatacatgcaaatagaaggatttgtaagattcttaaggaaagtctagaatttgcctccctccttggcctcccactggattccttgaggatttccttggggaaatactttgaaggctccagccaaaatgcaaatatgttttctgagaggattaagagatgaagctgttattaaactcaagttgtaataacaaataccacaggaagtgtagatcaaaaatgaaccccaaagagtggaggagcatatgagatctcacccatgcttcataaggagagccaggaataggacagacaatacctgaggggccatacctggggatgggaaaaggggctttcgttcaagataatgggaggtggagatgggggaaaggcgagaagtcagaaacaaatactagagagccaatatggggagcatcaggaccttgttaaattccagggtaggagtccagagttacgcatccaagtctgaccatgaacccaagagtcaggatgtaggagatgagaccagtcaaaaccaggtaagagtttcatgggagggagtgggggtgggcaaggaggccgagagctatcaagggccttactgctgtgatgcaattacagagggaccacagaggctctgctggctgggctctaaagcaacgctgtccaagagagccacagaaatgagccacatgagtaatttaaaattccctataaccacatttaaaaagaaaaaggcaaaggaaacagctaaatatgtttaatgagatagatatttttctctttttttcctttgtactgtgtcttcaaaatgtagtatgcatttcctatgaaactcgttcagcaatttggacagtagccgcatgtgcttagtggctaccatactgaatagcatggttttgggggctccactctggtcatcttctggccacatccctcaccatggtgagaagttggtggggccaaggggatctgcccacctctatcccctacatctttctagatcacacaccagatacccgaaaccctgaaatgccctgcccaaagggtccacagcctactcttaggggagtgcattgggaggacattggaatgttcatatgagtccttccctgggtccatcacaggataggtcaacctttctgagggtgaactgtgctgctattctgtgcactcttagccttgaggaggtcaaggcatggctgacagtggagaggcatggacagagcctggatgtgggttgggatgcctgtgcaggacagagttggggtagggggagagaagagagatcagtcactcactggcacaaggagcctgggccatttctttccacactccatatgcccatgtaaaactccaaggcatctgagaattctaaatttgaagctaaatttgacaaggtaggagaacagaacacattttatttaagagtttgttagcctaatttataagtttaaaatatttagatcagagtgagccttcactttcactcctgccaggaaccccacaaatgctggaggcaaacctgaccctgagtcttcattatttaccataatatctgatatttaaattcttgtctttagggaaagagtgagtaaattggcccaacttaaaaggtcagaggtacaatgaactctatgtaacacaaaaggagaataaattatttaacataaggatcccaaattcagttttatagaaggtaattttaaggagataaatacatatcacctccactgtggaaaccaccctcaattccaattagcatagttaattactcctttctttctgtgcccacagagcactttagtcaaacttctttctgtagaatataagtctatattttcttcaaaaataatgtattgctttattttaggaatctcagattcttttgagaatgtataacaaaagccatgagtcctctccccagggaaaaaaatgcagatatgtgcagttgggaatatgatttcacagagttcacagacttgagcctaagacgcctctgtttgacagggctgcgagggaagcactgacgccactctgcaccatctgataagtactctgctcagataggatgaataagcagcatgttccaggcatctattgctgtattaaaaccatcaaaaaacttagtggcttaaaagaagagtagttaggatgctacagtcctgcaagacacgatggggttggctctacccgtgtgttattggccaggtgccttcattaaggaaaggaggagccacagtggcttcactcacatgtcgggtgtctgtggctgcagcactgagagcaggctgcattggtgtgtgtgtctctcgtactttccctatagtctcacagcctccttggcttctctcctcatgaactcttcagcaggacagtcaaacctctccgtggtggtctaaggcttcaaaagggagactctgcttgtgtcaggcatgctaatttctcactggccaaagcaagtcacatgaccaagcccagtgtcaatgtgggaggggcttcacaaaggtatgactatcagcatgcatggcttattggggccaccaattaacagccacagcacagcctttccaaaaacaacgcggagggacaactattaaaagagcaaataatcataatctcttagagatactccacaatggatgtggggtgtctacttactccctccatcacttaggcctcagaccaaggtctctcagagcagtcttgtctgactaggtcacatctcctgttaggcaccatccaagaaccccatgtttttggtcttaaatacatatcacagcttgtaattatgtattagtgtgaatatctgatttcatatcacccaaactgaatggtggacactttgaggacaggaactacaactgctttcttattattacatctcagcttctggcacagtatcagacacatggtagaccccaataaatatttgaagaaggagagagggagagagggagagagggagagagggagggaaggaaggaaggaaggaagggtgggagggaggaaaggaaggaagggatggaggaaagggaggaaggaagggagggaggaaggaaggaagggaagggaaggagggagggaaagcagaaagagaaagggaacaagaatggaagggaaaggaaatatatggtttaagttataggaattcaaggtatgatttgattaacagtgacatccattgaatatgtgccagacatgacactaaggcaaatatcctatttactccccaacaaccctgtgagagagttaatattcaccccactttatggatgaggagactgaagcttacaggagttatgtgatttttctcaggctgaagagctggctagtggtagagctggcatttgacccagggaagcctaacctcagagctcatacccttaaccacttgtaaccattatctcccctgtaagtacaaattaacatttagaaacgaaaggagagcacttaagaacacaaagcagcttgagtgtctgctcaaggacttatgaagaaaagatgtacacataaataatcaaaagaaagggaaagaaatgctttggtgctttataaaagaggtcaccaaagaatagtggcgatcaagccaaaaagagagaaggagtgaaaactgagagcattaaggagataatgaggcagagaggactgacagagagagggaccctcaagtgggtggactcacatttcatcagaaagagggtgatgcaaacacctcccaggaggtgggagaaggattcactggctaaagtattgaaattgacctagcaaaaggcatctcccaagatgaatcacaatttcaaagcaccacgggcaaaaattgtgccaaataggaaattttatagcagaaatgaatttttattaatcacaaaaccctcgtctgagacttctagttttctgcttcaagcagagataacatatataaatctttctctatagaaaattttaaaaggcatagcccacacctgcgaggaaaaagatgtctaaactgaagcattgatggggatgtagaacaatggaattattccattccttggaatacccttcattcaaacaatgctctattgctggaagtgaaagccagtatacccactgtggaataccatcagcatctactgaggctgaaccttcatgcatatcctaggacccaataacgtcactcctgagcttatatccaacagaattgcatccacatatttggaaggtgcaagaatgctcgtagcagcactattcataataggctccaaatacaaaccacgtaactttccatctgcagtagaacggctaaataaaccttggtacattcacaccctgcagcactacacagtgatgagcatggacagagtacaattacatgcaaaggtatgaatgaacctccacacataaatatttaaagtaaaaaaaaagaagcaaactgcactgtggaaagtcaagatggtgactacccatgtcgggagagagaggagacctggaggggcctgagagagacttcttaggtggtttgtccattccttttatggatattatactacagtaaaaattttcaaagaaggtatgacacattcaaaagcaaaataaatgtcatcaagaacccaacatcaaatagaaatacaaggagatcaggagaggagcagcagtgggcatgaaaaagtcactgaaacttgtgcagcaatctcctgttcacaacctgtttaaagggcaggggatcattctggaagttccagtaggaacccttaggttggagatcttggatgggttcatatccctccctcctgaggtccttgtgttaagtcaattctaagaaataagaaggggcatgcctctcgtctttttcactgagctctgagcattgtaccttacacgtggaggggtcagagtaaatgtatggtgaataagtgatgaataagcaggattacatggctctcattttaagggtgtgtccaggtgtattcctctagcagaaaaccctgacacaaggaatgcacgagtttatttgggaaacacccccaggagttacctgtagtgggtgaggatgaagaagccagcacggggtgaatgaatgaacagatttctactaggtagatattttgcaattagaatgttcatgaaacagaatcaattaaaaagaagacagaaataattaaatgaaggactttacacacagaaggaggaaaggaaggaagaaaaaggaattctaaaattcaactttaagaaactcaacaccataagcaatagctagcagagggtcagtgatcgagaggatccaaacacagtttttaccgctgattatttaataagcactaatgcggccacagataggatatttaaattatatgtcatattttcttgaagtcgttatctaatgatgtcccactggggagcacatagtaaaaacacacctcaggatggtcccatccaaggtgtgaggaagctccagtattgatccttagtttgcatttgtgcttagctaaaggctactccctgaagactccctcctggttcatttggagtgtccatatattttggaattgtttagggagcaggggtgtgctgaggggaagagggagagatacaccaaaagtatctgctgaagatgtccataaaatattcttattggaaacataattttattttcctccaatgatggatatgggccataaccaaggactggagagataaaaatgggcttgaagagctgaaagtaaaaattgtgaaaatctcaggaggaggcaacttgaagaccctcctccctggccgctcttggatgtttaaatcccttctccacgctgctcattcaatgaacacccccaaagccaaagaagcctacctgaaaagcattgaggaagacagcaaccgaacctcacatgtcccatagctctctttccatctgtccggagccccatactttttgtttgtttgtttgtttgtttgtttgtttttatagacggagtctggctctctctcccaggcttgagtgcagtggcacaatctcagctcactgcaacctccacctcccgtgttcaagcccctgctctaagaaggcacatggcctgcttggtccatgttcatatgtgacttacaacatgagatgctatagttttcaacagtgaaatattgtacaagtgttggctccctgtctttggtttccatcccagcatcaattagaggctggaaaaaatgcaagattcattctgaaaactccctctctggaaaagtcattcagatgccaaattttaagatcagtgcttagaagatctaagcctcagctgctttagaagcaaagactctccagcccagctctcactcgacccccttggtctcatcagaattctcccaccatggctgttattactaattttatgatgacagtggagcattgacgtaaaattttaacagttcctcagttaattattaaaattagtctatcacggtgaagagattttctactgtttctatgccatgtaatttcaggtaataagtgagatgatgggatgcaagagatgcaaaactgcttgcatagacgttttgaaatgccagagagggccagaaacaaaacaaaaacaaaaatctagctccaagcaaagctcatttggatacactttctagagaagacactaaaagcatgaagacgtggcaaggaagggtaatttagagatacccttttagaactgctccttgggaaaaagcagagtccttgaactaccatttggtttatggcatggtaaaaatctaaagctaccaaagctaagaccaagtttttatttttaaaagatgtatgactatgaatctaaagaaatgcacagtacaaggaatacctgcctagttagacttattgtcagctccttaaggtgacagaccatacctaagtaccaagaagtattattatttttcagctgtaatggtgcccagcctggtagtgagtacctaataggttctcaataaactgttaataagagtaaatattttaaggtgttgtccatggggctacattttaaaatttgtttatctggaaataatttcaaacttacaaaatttgcaaaaggagctacacctcttaaaaagttgaaaaagtttggtataactgggaaattgtggtgtcagctacaaagcccagaggtgcaattgtaaaggccttgggaagaggtgctttctcaccctagagttggagcgctttgctctgtggtggggaggaagtggttcagaagatgtgactggccctgacagcccactttggtttctttttcttcacgacccatccactgggaaactaaaaataagagcattcgagctgtaagcaacgtcccctttcttttattttttcttttatatttagcttttagactagttgaaaaacatttccctagtgtctataaatcccagggtttctggaggctctatagacattaaatcagttccacacaaaagatccgaaaaacatctgagataatgtgtgcaaggaagtttcaatgtaggcggtccctcttgggtttcttcctcctcattgcaactggattcaaagttattcaaatgaatgttttattgtcgttgttttgtttgattttgttttaaccccagtgttctcccagacttttgaacttccttgtccattaaacataacagagcaactgaatgatgagctaaaacccctttggtcttagacattttttttcacctttgttcctggatgtcatattttttgtgtattttgctttgttttataactgacttgtagctgaacactgatggaagcaggtagttgggggaaagaacccaaatgataacacctatgtcaatttcattaatgccagggaagcatggaccaaaaaatagatccaggatcaagtcagagattttgcctatggccatctgtggcagactgtatttccagagagtcacaacaacatctcccacccataactctctaatgatgtaccgggacactcctcgcattcagatgtgttctctatattccctcctcttgagttagggcttgtgactatggcaaaatgatgttatgtgacctctggggttataaaaggctggcgttttcatgggacactggcttagagccctaagctgccaggtcatcaatctgactgacctgtcctgaggcagccatgctgggaggaagcccaaaatagcccatgcagggagatttcatgagaggctctgagactacacaaagggagagagggagatctgatagccaccagctgcttaaggccctgctgttactgctccagccaccttctaactgcaagcacacgagaaacctgagatagaaccacccagccaggccctgtccaaattcttgcccctcagaatccaagaaagatgatgaaatgattgttgttgttttaagtcactaagttttggaaagatttgttatacagcaatagatgatattcagaataccacttatatccttaaaagatttacaatcacaaattgaggaagaaatagtaataaatgagacacccatctatctatatagattcagttgacccttgaacaacatgagtttggactgtgcaggtccacatattcatagattttcttctgtctctgccacccctaggatagcaagaccaatccctcctcttcttcctcctcctcctcctcctcaggctactcaacatgaaggtgatgaggatgaaaatctttatgataatctcttccacttaattaataataaatatattttctcttcctttaaatattttaataacattttcttttcttggcttactttattctaagaatacagcacaaaatacatgtacaaaatatgtgttaattgaatgtttatgtcctcagtaaggcttctggtcaacagtaggctattagtaattaagttttggaggagtcaaaagttacacatagatttttgactgcacagggagtcagtccccctaacccccacattgttcaaggatcaagagtgtaccttttcagtgatagtgtaatatattttcatatgaatgaggtttatcaactatgtgattttagttctcctcaactaacttatttgtttccaaatgcttgggtcacaaggccaatttggaaatataaacctaatcaatctaaactaggtagacctaactaaacaatcagtttgatcttggtgtgtagggaagaaattatttttattcagtctcccagacacttatgaacatggtaacatgttatacaattgattttcaaaaagaaactctctaggctttaagagtctgaagtttcaaaagggtaactctatagagacccagtttacttagtcacatgtacttgactcacctcaatctgtattatgcaaaatgaaagagaagagctaatgtgtatttaacatagatttaatgttgaaagaagccttagtgacatcactgataaaaatatagcccttgaatataggggagctaacttcttaaaagccaactcctgtagcacatggatgttcaccttcttgaagacttcttggtataaattgcaccccatttaggtaagctgtcatgtgcttcaagaagaggagcatgtatcagttagctttggttgtgtaacaaaccaccctgaaatttagtggctttaaaaaataaccattttatttagtccatgattctgtgtgtcagttgggtgatacttctgcctgggttagcatggcttatctctgctgggctctcatgcatctgtgatcagttggcatgcgggctgatggctgagtgatctagggtggccaccctcacttgtctagcagttggaagtctatcagttgaattaacaagggtgaccatcaaccattgtactttgtttcttctccttatcttctctcattttcttgcaggctagctcaggccgggtaacgtgagggtctcaagattatagatgcagcatggtaaagcaaactccaacaagtgcctttcaagcctcagctgacatcccattggacaaagcaaatcccattactaattccagattcaaagtgtgaaatagggactccacctgttaatgagagatgtggcaaaatcccactggaaaggggtgtgcattcaggacttgggggccatttttgcaatttgctacagggatttgcttatagtcatgttgtaaacccatagcaaaaatctgatcatcgcagctttccttcattcaccaggagctgtcaagaggacacaagaagcaaacaaaccaacccaatcccctttccagttctctgacagcctgtcattgtccaaagggggccaggatgtttagttctggacagttagctctgagacacagagcataattttttttttaaacacataatgatactgattcaatataacagctgtgaaatgatcataaaaggagaagttagaaaaaggcccgtcagaaataagattagcgatgatgtttcagctctgcagttttcactgggctttaggaaaagaaatacagaacaaaaggttagttaactttctccctcctaatgaacattatgaggacaaatattctgttcacatgtacccctccggcagcctggttaatttgttaagcccaactggacacataaagagagctcctttatcttcattaaacccaataagaatgaatggcaaaccgcagcatcattactctggcctgatgggtttcgtcaaagggcctggaaagctcttaaaaccccagacactttaaagcttggctgggttagggtttgtttatctcttgcaataaatattggctgctcttacctccatccatagactcaggcaagccaaaacctgcttccaagtatacacagcagagaaagatacaagtacacatgcacatatgagcatgcatgtgccagtgtatgcacacacactagctctactacttcctagctgggtgaccctaagctggttatttagccttgctaaatctcagtatcctcttctgtaaaacaaaataataacaaaactcataaggttattgtaaaggtaggttaatctttttaagtgatggaaatagtaactgtctcacattgagtattatataattgttattgaataagcacggctactagagttggcagaaaattgcccaggagtagcttttgtgactttctaggttgctttggagcccaagtgacaaagtatggctgaaaattggcaatggggcctcttccacactcagtcttcagcggcattggagttgccaaatcctgaaagctgttaaatcattcctctttgacagggaccttgaaatgagagtgtgagggaagggcaaaggcagggatggagaacctccaggcagcagaggaacaacagtggtgatgattgatcatgtgatgacagcagaaaccaatatgtgagtacatgtgagagatcaattgtggacctcccagaaatactatcctaggggtgacttgatgattgttgggctttgaaatcatcaagaggtgtcttcattcacatgttgggatattggtgttgacttttatctgggaccttctctttcatacttcctgtgtgcttgacagtaagctgagcatccaaaagtggcttctccactggcctgggcttcctcacaacatggcagccttagggtatccaaaccttcttggtgacagcactcctaaagcaagtgctccaactctcaagttggaaactgcattgtcttcatgacccagcctcagaaggcacacagcatcacttctaccacactggttactaatgagacataagtttgtgcaattccaaagggaaagtcacagattgtacatcttgattggtgacaattcaatgtcacgtggtagataaacgtgtgggatgggagatactcaatgtcacgtggtagatgtacatgtgggaggggagatattgtggcagccaaaatgcagtcacccacagaggctatcaagctggaagatatttacattatataaataaatattttttttttcatttaaatgtgttttagctttttatcagtcttctcaggctgccatcataaaatatcacagacttgatggcttaaacaacagaaatttatttctcacagttctgtagggtagaagtccaaggtcaaggtgctggtagggttaggtttctagtaagggctctcttcctggtttgtagatgatgctttctccctgtgtcctcacacagcctttccttgatgtgtgcctgtgggagggaaggaagggagaaagactgtgagctctctggtgtctcctgttacaaggacactaattctattagataagggccctatcttatggccttatttaaccttaactacttcctcagaggccctatctccaaatgcagccacactagggggttagggcttcaaattatcaggggacataaacattcagtctatcacattcttcccctgctcccctgaaatttatgtccttcttgcatgtaaaatgcattcattcattccaacagcccccaaagtcttaactcattccagcaactactatgaagtctatagtccaaactctcacttaactatcatctaaatcagatatgggtaagactcaaggtacaaatcctgaagtaaaatttctttccagctgtgaatctgtgaaaccagacaagttatgtgcttctgaaaaacaatggtggacaggcaaaggatagatattcccatttcaaaagagataaatcagaagaaagaaagaggtgatgggtcccaagcatgtccaaaacctggcaagacaaattcaattagatcttagggctcaagaataatcctctttggcttgatagtcttccagatccactagggtggtggtctcactgtctagactcatggggtagaggttacaccctttgggctctgctgagtgggactctgaccccaactcccccaccccccagaccccatgtggtggcagcctggcctgtggaaacctcagtagtggctcaacccttggaaaccaaggaggcagccctgattgcgtctgtgtcaccttcagggttcctcttccctgttcttgaaggacagtgcacatcacaaacatagctctactggcctgtcctgtagagtctaagtccaacagccttctttcctttcatcccatctcccttctcttctgctccaactgcagtgtttctgctcatataatcccacaatgcctttattgagtattgtccagctaccctcctggtgttctcttctgaacatactttctcattttttgcagtatgaacaggctgagaattttccaagccttaaattctggtttcttcttgccaacattatgctcatgattatttatgtattcactaagaaaatggaggtattctctccagctttccttttttcctttctgtgccttcatgaaaatcacctttaatgtcaatatttctaccttcatgacaatctagacttttcccagcatgcacctcaaaactcctccagcctttatccattactcaggtccaaagcggcttccacacttttagttgtttgttacagcatcccacttcgcagtaccaaaatctttttaagtctgcttgggctgccataacaaaattcacaggttcctggatgaattgaaaaacagaacttcgtttctcacagttctggagtctgggaagtccaagatcaagatgtcagcatggtcagtatctagtgaaggctctcttcctggcttgtagacagttgccttcttgctgtgtgctcaaatggcctttctgtacacgtgcgtgctcacacacacacatagagggagagagagagagagagagatctggtgtctattcttataaggatattaatcctcttggatctgggccccactcccacaaactcatttatttaaccttaactactgctttagaggcctcttctccaaatataagcaggggagggtttcaacatatgaatttggaggagacaccaacattgagtccataaaaaactttatctaaataagcaaacgacctactttgcctacagaatctttgtctttctctatggcaatattacaaaagacaatctcaacattatgctgccgttatgtgttttgttatagaatgggaataagaaccaatgagttaatcatattctttggagcataacaattctatacggtgaaaggttaacaaaactctgtacattcgtaaaattctctgattagtgagaaaaaagaaaaagaaactattgggtcctgtagccaggaaagatgctgaatggctcacagaactgaaagaaagacctacaagactcgagatctccaggataataattggagtctcagccctgccggctttctctttccctgccatctctcatctctgcttgtctctctccttataagttagtcttgttgtctcctactgaagacatgagaccttctctatgagactggaaaaatgaccaacacagtaagacagagcttctttcttctggtgtcaacatattagttccagagaaggactctgattggctgtcttgggtcatatgaccaacctttggacttattactgaggataatgctccatacttaaccagggcatcatatgctcactgcttgacaaagggctcatgatgtattgcatctactgaatacatttttaaaactttaaagatatgtgtgtattcaaaagcttagtcgtaaaaataaacagtatcccaaagtcctaaaaaaaataaaaacgttcctaagagttttcacatactcctgttttccgcaggaatgttggttgggaaatgcagctattttaattataagagcaggctagtatttctgtctggcagggttggaaaacacctacagatagcgcttagtgctggctggaattcacaggcaagcaaattaaatggttcacaagttctaattccagtacctggaatattggaggatcccttgtcctttgagaggttggttttgggtgtaactgtagcccctgcttctaggggcaaaggtaacccctaatcccagctattatagcttgctgctggacaaccatggaaaaatttccatggtcattagctggcaatgagagaggtgacactgggaaatgatggcagggctaaaataacccttgttgcaacctaatgaaacctgaaagtaatttttcaaggttttaacaaagtcacacatgtctgtccaaccctgggtgacgaagcaatgtctcaataactaagagtccttctggaagacaggaggagactgacttcagctcagtattgtttggctcaatcatataaattcggttttaatcagtaccatggtctaaatgtttgtgcccatctctcaggttcatttattaaagtcctaacctccaaagtgactgacagtgttaagaggcagggtctttgggaggtcattgggtcatgagggcagagccctcattaataggactagtgcccctgtaaaagagagaccccttgctcctttcaccatgtgagaacacaatgaggagagagctgtctatgaaccagggagtggctctcaccagacaatgaatctgctatgccttggtcttagacttcccagcctccagacctatgatcaataaacttctgatatttgtaagccacccagtgtatgtgtttagtcatagcagtgcaaacagaccaagacaatcagccacatcttttgagagctatcttgaaaccagctgacaggaatacagacaagtgtaggagctggatcactagtgagcaccttgaccactccatagcgtccccctctccagcatgtcggcttatcccagtgtccgcagtacagtgataactgaactttggacagtgatgttagggaagaaacaacatgcctcagctcagcttctctaactgtggtgttcagggaggactgacttccaaacgtggctgaatattcaaaagtgattgacatgtcatcatctgtggtagattctttcctaagaagatggacacatcaattccttccatccattataccctttgcagtgtgacattgccatctctttacgaagaagtggggcctatcttcctttccttgagcctcagcaggccctgggactgccactgattcaaagaatgtgacagaagggaggttgtggaacttctgtgtacaggccttaagaaacccggcagcttccctttttgtcctctggacatgtaaagaaatccaagccatcttgctggagagggaggccatgggggaaaagaagctctgggggagaagagaggccatgcagaagagaactgaggaccccagccaaaagccacaccaaagcactagacatgtgagtggggccatcttggcttctccagccccagtggagatccgagccaacaaagcatggagcagagaggatccatctccccttgcttacgagccccacccaaatctctgacccacagaattgtgcacaataaaattgatgatgtttaaaccagctgagttgtggagtggctgcatgttaacagaaaactcatccaccctctcttcccacttggaagaattagtcccacaaattgggaagttctgcccaaatctgggaccgtcacaaggatcggaacatgctttgtgtcgttttcactagcttcagagcatttctctcagcagactaaaaccaaaactaaatgagttgagttgcttttctgtagggctgggccacgctcttcaaattcacaactggtttatttcgtgctgaaaactgttccagtggccctttgggggtcggtgagcagccccagtttcctgagagccactgggtgccgttttagcaaccctgagtctcttcgacctttattgatcttcttacagagtttgacaaatggctgttgacagaaaatgtttaaaatatgagattcagtctctcactgggtatacctctgcaacaaagtttctattggatatcaatgggaacattcaggccgctgaactcagcatcctaatcatttcccatatccatatcaacacctacactctgaaagtgatcagttctgcccattggtctctatggactgaggagaactttccagcagcttaggcatgtcctctcattatcaagtgatcaataaatcatttgcctaggtgcattttatggttgcccaatacacaacagcgtaataaaagtttgaattaggtaatgctcctttttattatcagaaatgaattacctcatggggccagcaaatacacaaatgtagcatgcccttccactaagtggaaggctttttcaatcagcttccaacaaatgcaaaagacaaaaacaaagtaactgccttccaaaattgccttgtatcaatattataggtttattttattgggagcattgttgctcttcatttaataataaacaataccataatttccacagcaaccacggcaagccatcagagtaatattaaacatcagttctaaacttgcaatgtttattcctagtccagaataggagggtttctgcagggcatggtgaaatgttcacactggaggaaacatctgtttttgttccaagtagaccctggaatgctggtaaaatagcacattatgctgatgaatatatgtaatgataccagcatccatgtttgctgtaaaaaggtatatcataccaagtggtggcatattccggtaactttaaagcgcatgtttcatttttaatgtttaaacaaaattcctcacataataattaaatgcctactgcatgcaaaggatggtctcctgattttctcggtttttggagtctgttaaatagggccaagatactctgatacccagcctgcgtgtccctcaagggtgaagccaggtcttcatcattgccctgtctccaatgtctggcattcagtaggcattcagttaatgcttacgaatgaacaaacacttcttgctgacacagaggcaatgaaagtgtaggaagttttcctagagcaggagatccataaattgagtctgaaaggatgggtagaatttagtccagaaaggggaaatgaaaggacaccccaggcagaaaccagccaggaaggaggcacggacaggagaagctgggagttgcgtgctctgatattcttgggttagttgagggtaaaaatgaagctgggtagagaggcactagccaggtcatggaggaccacaggggagtcctgcggggttttaagcagagaagggtctcaatcagtttgctgatttataaagattattcggttttgggatggagatggaaacatgggaggtacagctagagcgaaggagaaaacttaggaggccagtgggcttgtctgtcctgacacctcacgactgctcctgcaggtgcacagcacaggctgacctcagcaccatttccatcccgtggccacttgatctcaacaaggtcaaacaaaaccacttaggatcttgagacatctcaagtcctgaatgccgtgtttagagagagcacattgtttcagaatacagtggcatgctctactcccactcccctcctatcctcctattagtgggcacagctgagtgattgctcagggtggacaaaagggatgaagtgtcaccatctctctattagcttcaaaacatttcttaggataatccttccttggagttcaaggagtccctcccatcttcagccaatgttgggaggacaaatcttaaatggttgcatttgccgaaaacttgctttacacctaatggaaaaaggccacatccttccctgatgattaccattagagatggatccaaaaaccgcaggcagtcaggttcacagactttcccagccagagcacaccatgaacccacttaagtgccaggcactgttttcaaggtgctttcaagagcactggataggttttggaaaagaaaagcccaaaccttatactattttgtaagcatccgaaactgcttacctaatgcaggcccctcctagactggtctgtgaaaataataggacatttcagaagaaatagttaagaaatcagaattactcagagtagatgagaaaaaatgtcagcaaggactcacggactcctctgaacccaggtggttgatccatatagaaaatggagcctaagtggtttgccagctctatctgaagctcagaaaaagaaacatgcttgctttttatcaagagagtttaatttggacagaggaaattttactgatttaacaactgaggggttgttagggactgaaatggattacggaaaaactgccttcaaattcattcctcagcaaatacttactaagcacccactgtgtgctgagtgctgttcagtgctgcatgaatttactgatgaataaaacaaagattcctgcctaactggagcttacagtccatcatggggactaagggagaccaaccaatgaggcttgattactgagctgcctgagccacatgggtaaaatatagtgggggcacagtggattagcacggtgtagggacagtggagtaggtacatcccagtgtgggagcagtgagcacagtgcagggtgggtgcaatgatgcgtaggaacagtgctgtgtgggacagtgggtacagcacagcacagggagggtgcatcacagtgcagtgcgggtacagtgcagtgtgtggacagtgcagtgtggatacatcactgtgtgggtatagtacagtatgagtacagcacagcgtatgtacattgcagtgtggatgcactgaatacagcacagtatgggtacagtgcagcgtgggtacagagcagtatggatacagtgtaatgtgtggacagtgcagagtgtgtactgtgcagtgtgtggacagggcagtgtggatacatcacagtgtgagtgcagtaaagtttaggcacagcacagtgtgtttacagtgcagtatgtgtacagtgcagtgtgtgtgtgcagtgcaatgtgtgtacagtgtagtgtgtgtgctgtgcagtgtgtgtactgtacagtgtgtgtgtacagtacagtgtgtgggcagtgcagtgtgtgcgtacaatgcagcatgtgtccagtgcactgtgtgtagtgcagtgtgtctatagtacagtgtgtgtgcagtgcagtgtgtgtgctgtgcagtgtatgtacagtgcagtgtgtgtaagtacagtgtgtttacagcacagtgtgtgtgaagtgcagtgtgtgtgcagtgcagtgtgtgtagagtacagtgtctgtgcagtgcagcgtgtgtgcagtgcagtgtgtgtacagaacagtgtgtgtgcagtgcagtgtatgtactatgcagtgtgtgtactgtgcagtgtgtgtactgtgcagtgtgtgtgcagtgcagtgtgtgtgcagtgcagtgtgtgtactatacagcatgtgtgttgtgcagtatgggtatagtgctgtgtgtgctgtgcaggatgggtatagtgcagtgtgtgtactgtgcagtgtgtgtactgtacagtgtgtgtgtacagtacagtgtgtgggcagtgcagtgtgtgcatacaatgcagcatgtgtccagtgcagtgtgtgtagtgcagtgtgtctatagtacagtgtgtgtgcagtgcagtgtgtgtacagaacggtgtgtgtgcagtgcggtgtgtgtaagtacagtgtttacagtacagtgtgtgtgaagtgcagtgtgtatgctgtacagtgtgtgtgctgtgcagaatgggtatagtgcagtatgggtactgtgcagtgtgtgtgctgtgcagtatggtatagtgccttgtgtgtactgtgcactgtgtgtgctgtgcagtatgagtatagtgaagtgtgggtactgtgcactctgtgtgctgtgcagtgtgtgttctgtgcagcatgggtatagtgcagtgtgggtacagtgggtacagtcaggtaattgcatcactttgaggggggcagggttttcacttgggagagactgctgtgtgagtaaagggtttggctgggctaacagttattcctaggaggctcgggcagagactttgcatttagacaagaacaggacatgaagaattctgcagcccatgccagggagtctgccctgaatcctggagaggaacagaaacatcttcttctgtagactgtggacaaattaatgaaatccctagttactcactgcttgctgcttagctgaggctagctcagtactgggggagagccttatctaataatcagaacctgttagaaacttggtcctcaaatccctcgtctccagtatgaatcaaaactcctagctctgcctttctctggatgtctaacaattgcttcacccaagctcgtagagagcttgagggaggccctatctcagcaggggcagtttatccacatccctgctaatccaccctacaagtgattggattaagccttcttcacactcagcctctcaaaacagaagcctggttttaagggcacagtggataacagaagcacggtgtggcttagaagttctccaacttgcaatcctcagtcctcaaggtgatgcagtttatagccagggctccctgctttgtgatctccttggagcagacacagtagctgcataagactgagtttgtccccagttggcgctggcagtctggcctctgctgaacctcccagctgtttatactgcaaagggatatcagagctgggtcaggctctactggggtttccaaggatggtcaagaagcaactatattcacctcaccctcttggctgggctcagtaacactgattttcatcccttgcttcttgatgtcagaggtgggggacagtccccagaagatcggcacttctattcttcataatcataaacccccttatattcttcacagattcccaaagggatgtatggggtggcattattttcctttcacacacattcacctaatgtaaggccccccaaggaatctcccaacccctgaggttcttcattattttcttttacagtaaccaggacatgctcccatttggaagttaaaaaaaaaaatgtaatttcaaataatagcagataccaaaagatgatataaagaatacagcaatgaaacacatcgcttcattttatccctctacaatgtggtgacacagtcacagatgaagataaaatagttcaggggtcagcaaattttttctataaaggggcagggatgaaatattttaagctttgtgagccagaaggtctctgttgaaactactccactctgccattatagcataaaaacaccatagacaatatataaatagggtgtagctgtgatcctgtaaatgtttatttacaaaaactggtggtaggccatgtgtggcttgcaagcagtagttggccaagcaacagcttgatgtactacagagagacagagtggggtaaaaaagaggacaaagccttcaggaacagcaaaatttaaagcatcaggagtacagaacggtgaaagcctgattatagtgggctaaagagtcatgaatatatgtatatgcatatgtataggtacatacatacacacataaaatatgtgtgtatacatacatatatgtatagatatgtgtgtatatatacatatatgtatagatatgtatgtgcacatatgcacacacatatatttctttccgtgtgtttttatgtatatatcatacatatgcacttcaggatttccatttcttgtagttaaaaagattgtgtctattgaatttctgtttcttgctttttcctattgaaaaagcaattctggatgaaataatgcatctctgacctgcatagggaggaagaaatcttcagaagaacatggaaacaagagtgaaaggaggcgccatgagtatttacatcaaccacggaaaacaatgagatctctctttgtcagctgcatggtacccagggaaagagaggtaaagccccagcccaagcaaggtaggaaaccgaagaggaggcccccactgtgttaattacatgccaataaccttaggtgctccactgctgaaaggacacacaagactcagtttatactcaaagaacagctttatcagaaagaaccagcacagcagcagaagcagaaggacgtgaattgaaggggccaggggaccacaggccacagcttctttgtcttaccacagctgggtcttataggagagcttggtctccaggtttctagcaagcactggtgtgtgtctgtgtgtgtgtgtgtgtgtgtgtccatgggccttgtgtgtatatgtttatgtgtgtaaagcaccttggtaccaggaagcctgttcatggtgcgggtctctcatagacaccttctagctatgtgaccagccttaaccattaaaatccatgccccatctccagcctccaccaaaaccaggaacaaatcagaaacacaaatattattgctaaacaatgctggcagactgctaccttctgctctgaaacaactccctgatctataattacagagcactgtttatctttagtgaactcactccaaaaccttggccaaggatctgaagctcaggagataagcatgtgtctgtacagcccagtgggtgaacccctgctactcgccacatcaaactggggatcctggatgtcaggaatacctctgtggtccaagagacctcaagagctaatttgacttaatgtggtcccaaatcggtagtgcccagagataacaggcagaaacaaacaaatcctttatggacaaactcaacttcaaccagggcctcaaaggactcacacagataaagttctagggaaaatggacagctcacagacaagctgccacaagcagagacagcagagagcaggaccagaaccataaaatcttcagatattgcagttatcagcctcacagtgtaaaataactattgttcatgtttaaagaaataagagaaatttgaacatacaaaaaaggaatcagatactgtaaggaatggtcaaaatgattttaaaaaacaaataaaacttctcaaaatgaaaactataatatagtcaatgtgtcatttagcaaaggggatacattctgagaaacacattgttaggtgattttcacattgtgcaaacatcatagtgtacacttacacaaatctagacggggtagcctactacacacctagactctgtagtacagcctactgctcctaggctacaaacctgtgcagcaggttactgtactgaatactgtaggcaattataacacaagggtaagtacttgtgtatctaaacagagaaaacgtacaacaaaaatgcagtatcataattttacgggaccatcgctgaatatgtgtttcatcactgactgaaactgaaatgtcattatgctgcacatgactatatttgaaatgttttaaaatgaattaaacaaaagctctaacacatcgaaaaaaagagaacaagtgaagagatagaatgaaattgttcattatttagcccaaaggtacaaagagatgaaccaaatagaggagggaggttctctgggccagtgaatgataaagccaggacccactcgagccgttgcctccaggttggctcagtttgctagatcttctgttttgttttgttggttttaatgagaaaacagaaatatggcttttttctgtgaaatcttgatggttaaatgttggaaactaactcaactgaaacaaacaggtgggtctgtaggcatgagcagccaatcggtgaccttggctttatggtgcagaggacagcaagaaagaggtcaaactctaagaaaagacagaggtaaacagtggcgggagatcatcacaggccaggagggatgtggctccaggtccccgtggaatgggctgagccacggacattaagggtagctgcttttcctctgacaggagggacagaggtgcacagaggtggaagttagtttggtgtatcccaatcagcttgaggaggttaccaagaccctgatattctatgagcaaactgctcttgatctttatgccaaagacattctggtcaaagagtttctataaaagcaaactgaatcttcattcacagcactaggacagtaaacatactaattaaataaaacactggcatgctggacatcagagctgttggaaaaaaatctcagaaacatagtttcttctgctgccaggcaggagattaattttgtttaacaaaaattaaacaaggggaaattatccctaaatattcaccaaggatgaagagatattctggaacaatgtaacaaggaaatacctttcatgatgctgatttctgaaggaagactccctacagtctaagaagtgagagaacaagcaagtggcaagcaaagtaagaagaaagaagggggtaaagggaagagaatagagaaaataccatcggatgttttgaaagccactaaaaagcagcaaggtggattctaaatcacaagtaaaaaagtgacattgttcactgaagtcctcaagaatttccagacaacctggcataacagcagaaaccaggaggtctgtgttttcaggcctttgtggacggtctccttgctgctctctgtatgtagaaaactgagcctaggggccaaaaataagagctcaacaaaggtgatttctcttttcagcctagacctgcctacatatgggtgtttttttgttttgtgtttttttgttttttgtttttttgttcttaggacgtttttgtgcccattctcagcagttactaaccacccttttctgttgcttcaaagaaccaacactccatacaaagaggctgtgtgctgtgctacagtcttaaacttaagatgggagggcatatttgattaagatctatgtaaattccacccaccaacagagtgaattttcctttgctttgaaaatacagtttgccggccgggcgcggtggctcactcctataatcccagcactttgggaggccgaggcgggctgatcacgaggtcaggagatcgagatcatcctggctaacatggtgaaaccccgtctctactaaaaatacaaaaatttagccgggcgtggtggcgggcaccagtagtcccagctactccagagactgaggcaggagaatggcgtgaaaaaacctgggaggcggagcttgcagtgagcggagatcgcgccactgcattccagcgtgggcgacagagtgagactctgtctcaaaaaaaaaaaaaaaaaaaaaatacagtttgcctatgtctgtatttgtgtttctacaagcagcaaggtcttcacttgttttcaatcaccattttatattcaagctttctcattctaaattcctctttggaaaagtaatgtctcccccaacagataccggcatttacagaaaaaaaaaaatcaaaaaataactttgtttgtaccttgtgttctgtaagtgagatgttttcaagagcatcactaagccaaggtccaattcttgcaatttatcttgaatattgccttggctacagttttgaattatattttgcctgcaaaattattaggcagctttctctaaaatccaactatatgtaagtagtatttttaacacatgtaaacagtgtataatacggaaatcattttcatgttaatctctctgtcacattaagacaaaaaatgtagatggcctttttccccctctgagaagtcttgtgactgaattttccagagggacacttcctgagcctttctgtgcatagaaactaggtggggatctcattaaaatgcagagtctgattcagtagttctagggtagagcaaagattctgcatttctaacaaactcccaggagagaccaatgctactggttcaaggaccacatttggagaagcaaagagaccaaagcagtggttctcagccttggcttcacaggtaactcttccaaggagctggaaaagcacagttgcccaggtcccaccacagagattccaatatctggtctagagggtggcctgcctattagaagtatgtaaaagcaccctcaggggactggagacagtggctcatgcctgtaatgccagcactttggggccaaggagggaggattgcctgagtccaggagtttaagcccagattgggcaacatggtgagatcctatctctacagaaaaatctttaaaattagctgggcgtggtggtgtgcacctgtagttccagctactcaggaggctgtagcaggaggatcacttgagcccaggagttcaaggctgcagtgagctatgattgcatctctgggcaacagagcaagatcctatctctttaaaaaaaaacaaaaaagcacccaggttatcccaaagtgcagctcaggtgacaaatcaatggtctaaggcaaggtccaactgacagatgtttcacatccttgactgtgagcttctgcaaggcagggtttgtagttctgacatctctttctcctggaaggctttatacagagactattaaggaatcacagcactgttagcaatgttatccacgtgcttaaaattaaacacaacccctatgaggtaaattatcaggatccctttaccacttacattgggaccagcacatttgagtcagtggctcctgctgacacaatctgagtcagtggctccctctgacacaatctgagtggtccaatatgagagtttttatagccttgtatcattgatctcctttaagggtcacactcaaaaactaagaagaagatataatctgtattctccatatagaaggctaaggccaagatagagtaaatatttaggtgattaagggctcatctagggctgtgtttcccagaggaaagcagtattctatctccattttatagaacagcataagcacactaaatactttggcaaagtcttaagataagaacttacattcctgaggattttatgggcagcatgtggttgtcaaagagtcccaagctacaacccaggtgatatcaaagatgggtcatcaagattatatctctccctgacttaatgacccaccaaggtgccctcagatctgcagagacccacccataaccacaggtactgtgtgactatcaaggttccaaaatatgttgaaaggaagacaaatacaataaaagaaatgcattgtgaaaaatgattgaagaaagagatgctaaagtcagatcactccttggacaaattttcaaaaccctccaggtttctatttccctggtttgaaactggtaatagtgatactccttcactaattcacttttagaaacctataggtctataattataactcatcatgttactatctattggcaactggagcctagattgtggtaaatttttagaatatagttgaacttctgtataaaacatcatccgtttcctccacttatttttctctcctctctgtgacctctagggaagactccataagtactattgaataatgagatgaacttgaagacaactgtctgtccatttatgctgctattaaaaaatacctgagactaggtaattaaaaaaaaacagaaatttatttcctcatagttctagaggctgagaagttcaagttcaaggcaccaacaggtccagtgtctggtgaaggttgcttccccacagatggcttcatctgggtgtcctcacatggcagcaggaatagaagggggaaaggcagatgaacactgtgtcctcacttggtggaagagaacaaatccactccctcaagcgctttgataagggccatgattccatccatgagggctccatcctcatgatctagtcacctcctaaaggcctcgcctcttaatactatcacttggtgattaggtttcaatatatgaattctggggaacatattcagactgcagcaacaacaaaggagaactctaagggccagattcctctgggtaagaaggactccagggcttactctcatggcacgtttcccactgcatacatcctattctgacacattgatatgtttttagtaaaacatgccattgcaaaaggattgcttcaatgaagagttcaaatccagggctcattgcaaaggccaagtttaaaccagtcatcactagcatgcaaatacagacggggatcacaatgtcagggtaactgcagcttgcatttagacctcagcaaatctattttgcatatttctgagacttccaaggggattctgatatatgttcaattgtcccaaagggcacttctgcggccctgccagatctcactctcctctaacattaagccactaagtactgtagatttgcaatgttgctgataggcaccaggttaattgtatattagagagatccctaggcagggttgcttgagacccagtgtcattcagtacttcaatctctttatagagagcccaggcactcaggggtcttctgtctcatacaaaccaaatttgagtcccagctcccacatatattcacaatgtctagttccctcccacatcatctacgactcctgaagcccttttacataatgagttttcttccaggagacgctgccaaacaaataaatgtcagttgaactctcgcaccagtccaccagccatgctcaagccttctggacacaagcagtgggcacaactgagactgaggcaaagatcagtaaaagaaaggtgttctgccatagatccaaggagacaaatggagaaaatgccattttttacttaagtcccctttttcaaaaccaacaaacataacatttctacaacaataggaatctaccatgtggtggtgtcatagatgttgttgggatcagaatcaacttgccaaatgggaaagcccaaatcaaattattattcaagtaaacaaactgaaaatgaaggcattcccagacgcttttgacaaggggcaaatggactactaaatcaaccatttcataaataaatcagcaaaatgcattatgtaacactcacattaatgacacacaccagattgccaagattcttcatcaaatcttttcaatctgggtccttatattgtgaaagggtcgattcttatggagagctcataacactaagcaagtctctccattgatgtttctgccatcaccaaatgttttccttctgatctgtctccaggcctgacatttttgcaaattaaactggattacattatccatgatggcgtaaattcaattatccaaataactaaccagccagctccatgactaaattatccacctgctgccttgaactttttgggattgataatgtgctggtttcatttctattttgaaaagtaaaagtggatctgaatttctcttggaaaagaacctaagaatggtgttcccttcttatgtatttatttaatttttttgtagagatggttcttgctatgttgcccaggctggcctcgaactcctggcctcaagtaatcctcgtgccttggctcccaaagtgctgggattacaggcgtgaaccattgtagtcctttcctcttaaacattattttacagatacatgatcacacccttactgtaaaagagtcaaacaatgtaggggtgattaaaagcaaggactgagtgtccctcttcatttccctactcctcccctcctcccggtgtcattcttccagtctgcttttttggcagtttatttaggtttccagtttaacacaatctcaaacaatgtcagaatagacatgcttacctttgtgcatatcctgaggtcataagaaagtcatctttttattaataaaaatactgtcatatcacccaaaagactttgtaggtttatagtccctctaacaatgtatagaagtgccttttcccttcacactcaacacttcataccatacttcgtattatacatcttttacctttgccacatgataggtcaaaacaactcattatttgtacttccatttttaaggttgtaacaaaaaaaaatccaagatgaaaaagtgccaaaatatgttggtaaaaaaattttaactaataaataaaaagtcaattttccagcaactgctgaatgaaagcaagacatgagagaaatatattttcaagttcctatttgaataaaagaataaaaaagtagagagagattttttagagttgagagcaactctgaagagtgtttaaagatgagagaattgaaccatttgggcctagacattttgattatcatataagtttttattgctaccttaacagataaccacagatttggtggcttagagaagcacagaccaattgtcttacagtttggtaggtcagaagtcccgcaggggtctcaccaggctgaaattaggatgtcagcaggctgtatttctttctggagtctctcagggagcattggtttcctgctcattggggttgttggcagaatttagtttcttgtggttgtaggactgtggtctccatttgcttgttgactgtaagctgagggccatccccaccttctagagactactgcatcccttggctcaggcccccttcccacatcttcaaaccagcaatatgggttgggttcttcccacatcacatctctccaatccactcttcccccttttcctcttttaagagtgattgtgattacattgggcccacctgggtaatccatgctagtctttctattttaaggtcagcttcttagcaaccttattcccttttgccatgaaacataacatatccaaatgttctagggattggggtacctttggggtgacagattgatcatcaccctttaaggtgatggaatgttcacggaagccccaaggaatgatatactttgtgttttattggcttttgcctctaatgattgaatttttaaaaaggaaaatattaataaaaaagaaaattaattctgaccctcctcaaagctcttaaggtaattttggaagcccctcatcctgattcagtcagctaccacatggaggctgccatctctttccttttctctttctttaggctcccttccctaactgcgaggcaccggacatcattgtgacttcacagtggtcttccaatgtgctgcagtcatgcccagctttctcttgagagaaagcaggggacatagcccacacctcaatctgtggcacactttactgcctgggtaccccagcagccctgccaccactgctgggtctccccaggtctcatgcttcttgtgagtcttgggaggagatgagtgatatataggggtcccttcacccatctccttgctcctttgggaggggggtgggatgctcagtgaaactgacactgggcaggacacagctcatcagacatgtccagaggggtctgattcttataagtatgtacacacatactgcacacatatgtatatgtgtgtaaatgtgtgtctctgtatatgtgtatacctatgtgcacacacatatgtgataggcagatacacacacagtgaaacaaataatctgcttttctcccaaggagttcaaatactatatttattatattatttattataaattggtcttgtaggagcccatataaaacaacaaatagtctcatttgccagactgcaacatttagacctaagaataaaggtatttttctcaagttcatcaggacagctatagccatcaaccctggtacatggcagtcctggccagaaataggccatcatcatgctctaacctataccacagcattagagttactaagacattattttaggcagatagagaggaaaagggatccttgggaagttttggtttcttttaaagcagctccagaaacgtttcttgtcttcaggacaacgtttccttggcttcaggaaagccccagcactaagagctgggctgcaagctttttttttttttttttttttgagatggagtctggctctgtcgcccaggctggagttgcagtggcgcgatccaggctcactgcaagctccacctcccaagttcacgccattcttctgcctcagccttccgagtagctgggactacaggcgcctgccaccacgcctagctaatttttttttttttttttttttttttttttttgtatttttagtagagacgtggtttcaccgtgttagccaggatggtcggatctcctgacctcatgatctgcctgcctccgcctcccaaagtgctgggattacaggcgtgagccaccacccccagccagggccagcaagctttaatgtgcaaatgcaggccattagaaactgggtccagccaaatatggcggttcctgcatcttcttcttgcccccacatgtgcctggtaacatggctgcccccacaaatacccagtgtatagaacaaaatggcaacctgattttgcatattgaaaggctaggatgggagggccagttttttcacaggctacgtgaatgacatgcctggtcaaaccaatcccctgagtcctatgcaaatcagacaccacctcctctagcttcctcatataactggctgttttctgtggcactcagggtttcctctctgggcttggagcccctctccctctgtctctgtgcaggggagcttcttccttctttcttgcctattaaactctgtgctccttaaaccactccacgtgtgtctgttgttttgtataaatcgacatgagaccaaggaccctggtgttcgtctgttcatcagagttgtatcaacagcaagatttagacactggctgagatgcctccattcctaattgtctttcaaacgtggaaccaggaaaaagctatggaaatgacaaagcacctatgggtgtgcctaactttcgttttcctaacaaacattatcatctcaaaaatggcataggtttccatgtggcataaatgctgggacattcagtctggggatgatcctccagatatgggcatcttggccagaaacctactttgacccctgtcctactgtgtgcaccgtgatagaaaactaactaaaatgctatatttacactcaaaacttttatttgactcactaaagaaaagaagttgacttgatcaactcagaatcctgcaaaatggagggaccacgtagaatcattgatggtgctttcatggttatctaattcaatgccttatttcacagaaacagaaagtaaaagtcaacaagaggtaatgacttgctcaaggttatgcacctcgttcttatcaaagctggatcgccaaactcccagtgactccattctcctctgtgctgtgctgcatctctgtcactcatggatcactaatagtcaaagaatgaaattagcaggcttctgattaaagatgacacacatactatgttcatttgcttgaccatagtaagcatttactatgtatatgtatgtcaaaccatcaagctgtaaatcttaaatatatagaatttttatggaaaaaaaggatggtacatggagtgtactcctttagatccctttcctccccaaactgaaacagaaaggaaataagataattcaacagaaacaaaatgtaggaatcttgaaagcagatgagttgatgttaattaaatctacaaatctgaatccttagccaaagagaacctgaaatatatcacagtactccccaaagtttcaagaattgtttgcatcaagtgcctttggaatgggagctattagtggaacatagaaaaggagaattcgttgaaagtctgcttaagaggctattagaacccaggtctaactctaactcttttatatgtgatacagcaaagccagtggccctccctcactgcaagtgaagaatggtagcaggtaagtgagaattagggtttgtatatgttgaataacagtcttgattgcagaaccaagggctgatgagtctgacaagatcaagtgtcgagtagccataagtaatcgtattaaaactgttttcttccatatttttcgggtgtcaactcccaaagtaaacacaagactcacaaacagtgaaaaccagagctgcccctgctgtagatgcacaccaggcaggacactaatggaatcttaggtcatccctcttctcatggtgactttgagttaatcagagattaccttggtaaacctgactcagccagagggaactttataagaagatgaaacaccaaagagacattctcctgctgaaccgagagaaagtagagaggcctgttgtgaattataggtgggggccatgtggcaaggatctgcaggaggcctctaggtactgaaagtggtccccagttgatatctagcaaggaggctatacagtcatacaggatatagtcagtcatgcaaccaaaaagaaatgaattctgtcaacaaccagtgagcttggaagagaaccctgagcctgagacaagaatcatggccctggccaacacctggacttcagcccaataaaacttggagcagagaaatcagccaacacatacccagactcttgaaccatggaaactgagaaaatgaatttatgttgtttgaagtcactaagtttgtggtaatttgttaaattgcaatggaaaccattacctctgggcagtatcagtggaaaaaagtggtcaaatatatatatggcagaagtaggccacaggccaagtatactgctactttagcaggagtgaatttttcattttatgttctccacatttatcctcccatgtcttcgttttgtttagttttttttatagatacgtaatattttacatacttatggggcacatgtgagagtttttaacacacatagagtgtgtcctaatcaagtcagggtgttattgtattcatcaccttgagtattgatcatttctatgtgttggtaccatttatttatttattcatttatttatttattttgagacagagtctcgggctggagtgcagtggtgcaattacggctcacagcagcctcgatctcccaggcttaagtgatcctttcacctcagcttttcaagcagctgggactagaggtgctcaccaccacacccggctaatctttgtatttttcatagagatggggttttgccatgttgcccaggctggtctcaaactcctaggctcaagcaatcctcctgcctcagcctcccaaactgctgggattacaggcatgagccacctcgcccagcaggtactatttgaagtcctctcttttagctactttgatatatacaacatagtgttgtgaacctcacttctaattggagagcagactatatttcccattttcctgactcaatttggaacaggctttgaaacttactcatctcactcaggatggggaaggtccagaccagactcttgtcccatgggctcctaggagggggtgggctgggtcaaaagtgaccagactaaaggcagaatgttctatacaacatgatcctaaatggaagtggccagaaatatgactcagaacaaatatccaagagagaaaagtcaaaagcaggagaacaaaacttagagccctgattacagacagggctaaagccaggaagcaaaaacagagaccgaaagcaaagaaagccttgtgttgtttctaggtagagccgtggcgcagtggacaccttggaggtcagcaggtgagtggtgtggacatgccaggctcctgtaaaagtgtagggctacacaattactgtggcccttcactaagctctagcatacaggtttggaatgtctccaaggcaagccctcattggctcctttggaaagctttctacaggtctgctttggaatctgtgtggggaagtaagccaagaacccacataccatggctggaataagtggtgtgtaggaaacttccccccagaagtcacccagcttaaggtgggccttgctgggaacaccctgctggaggtctctgtggattcccaaaggaggtttcaaatggagtcattgtaaagacaattcatgatcttagaagtgtctcatgcagtttcctcgtgatggtcttgttcaattttcatagaattcctatgtgtatattcattacattcatttttgcagagtcaattcatccaataataagaacagaaaaatagaagacccagaatattttggcccaggctcaccctttaacagcccctcataaaatccaagtgttggaaggaactttagtcagcatctgtcccaacctcctacactggtggggaaacttgggttcgaagagaatatgcgactgtggaagaaaccaacaacttcaaatgttcaaacactgctataagacaaagtgatgaaaaagatgaaattggagatccaattctatgctcatgagtggtgtgatctcaggcaagttactttatgtctctaaacttgaatttcctcatctgcaaaaatgaatataataaatatacacataggaattctgtggaaattgaacaaggccatcatgggaaaacacacagcagcatgcatgacatataacttttctatacattttcttgtggtcaactgttcttgcctctcttctctttggacccattctgcagaatcatcttggaagaagtcaaaagcattgattttctgaatctgtgcttctaaatcttgagtcttagaacaaactcatcaccctctccaggcccagaataaaatagagctggtgttcccagcatctcatgacagcctcttagccttgtaggaaaactcatagcgtggtctgcagggtagatgcaggaaacatcaaagccccaagtcccagtcctgaacacagtgaaagacaagctgtcttgaaaggatcagcttgctctgttgtaggatgcttcaagcatgttaaacaggaactaatggcaacaatggaaccatgactcatggcaatggaagtgcagccattaaattttcatgatttcagagctcaggacacacgagttcatcactatggcactttttatgtcagtgaatttataatgaacatagttgttgaaaatcagcactattcacagccatagcttagtacataatgctgccattttagaaattgttatcaaaactattttactataaaaactaaaagaacctttaataagtaaaggaacctaaaggccccagcaccacaattatttctcaatgggctaaaaaaaggttcatagttgtcagttaatgctttcaggttatggtaccagttgggccttttttttttttttttgacagagtctcaccgtatcacccaggctggagtgcagtgctgcaatctcggctcactgcaacctccacctcctgggttcaagcaattctcctgcctcagcctcccaaatagctgggattacaggcacggattacaggcacccaccaccaagcccggctaattttttttgtatttttagtagagatgggggtttcaccatattggccaggctggttttgaactcttgacctcaatcgatccacccacctcggcctctcaaagtgctaggattacaggcatgagccactgctcctggctgggccatatttttaagaagacaatgtgatagagaaagctcggcgatttgtttagctaatgggtaataaaacctgaatgggcttctgttgcccatcccctagtccagagtaatttcatatgtctgtccccagcccatcatcacacacacacacacacacacacacacacacacacacacacacacatgcaggcaccaatttaaaaagaggaactcctcaaggggccaacttgtatttccatatcatcactgggagctctctctgacttgtcatccactggctgtgcagtttgaggaccttatcagattgacctgtcccagatcatagatcctgagacaaggatttgagtgtagatggtttattgcgggggaatgggtgacctcaggaagcactagtagggagtggggagtaaaacaggaaagggaaggtggccaatataaggtattttgatgtgcgagttactgtgatgaggctcagtcccactggggacctctgggagactgtatagaacatgccttggagtaggtccctctttaaggagttaaagagctgaggtgtttagctaataacttactttcatcattggttaaaggctgcccccaggtgaactcctctatactctgacctgccccacacatcgaccaaggacacacctgcagccagcaaaagccctcaggctttctcaggtgctggcaatgggacgtcattaacatgcacaggaatggtgagtggcaggcaaatacaggcagggcactgacgatgtgtgtgtcatgctacttataaacctcctcagttccagactctctcaagtggccctactaccacttgccatctccttcctaacaggtcactcagagatgggccctggcagttttctctggaggaccctgcctgcaacctgcccttgtgcacagccctgaccaggaccagtgcaggaaaataaaagagggggagaagcagacgggcacccagtgacaggcagcacatgtagtggttcagagcctggacacaggtgctccatacctcagaatggagcccagatctcctatttttcactccaaagttattttaactctggaccttgatattctccatgagtcaattctatcagccaggctgtttaaagataccccctaaaaaagtagcaccaaagatatgccatgttcatacgagaccctctacaagccaccactacagacccagaaggagaggcctggtgctcaggggccaagccatgcagcaagaaaatactgttgttttctggaagagccggtaaacattctgggagggagctgtaagggacaggtagctaaaaataatgacagagatgcacggtttcattacagtcccacagaccaccagcaagggaaggagagccatctggaattgactgaacataagcaaggtccagaagattttaattttaaaacaatttgattatttaaaaagtataagaagaacctggaggaaaacaaaatggttaagggtgcatgtgagagaaaattcttgtgtatgttcatcagtgaaaagagataatgagaaagagaaaagcacagaaataaatagaaagacagagaactggtcgggcgcggtggctcatgcctgtaatcccagcactttgggaggccaaggcagatgggtcacctgaggtcaggagttcgagaccagcctggacaacatggtgaaaccctctttctactaaaaatacaaaattagccaggtgtggtggcacatgcctgtaatcccagctactcgggagactgagacaggagaatcacttcaaccagggaggcagagtctgcagtgagccaagatcgtgccactgcactccagcctgggtgacagagcaagactccatctcaaaaaataaaaataaaaaaataaagtaagaggactaaatggggagggagagaaaatgagagaagaaaataaaaggtgtatgaggaaaaggaaggagacaatttttctgttgagactttttagttctaaacaacagaaaataagtctgattgattcaagtttaaaattacccattggaagaatagcttataatgcaaaaaatagaaaataaaaaaatgaataagcaggcctcaggagaatgggggaacaggaatgagacagttcagctccccaaatctaggcagcaggaacaaatgggtgatctctcccggtgtctgcactcaacaccaaccatgttctatcaacacaacactgaagactcaaattcccaggaggaagagtgtggcctattttggtcacgtgatgtgcctttgattgaaggttgcttgggaagggggagggaggcttgattgacagtcccacatagatcacgtggaatgagggaaggatgcctctatgatggtaacaaaacaaagagcaagaggagccaggcaggcaaaagcatcagctgtccaccacccaaagtgaacccaaaagagaggaagacagtggcactcaacggaagttagaagaggatgagccacaaatgtgggaaaaacttggggataggaaggggaaaggatgaacaaagagagaaaatataagagtataagaaaattatccaggggagagaagctaataaaggaagaagaaaactagcttctgtatgaggagtgaggagccagacaggaagaagggaaagggaaaggagagagtgtcgtgggatggagatgatggcagagaatcacttagggctcactcatgacttcatgagtctgtgatgctgctcactacagatccaggccttgccaggcctgtgaagttggtggaaagtgggagggcccaggccaccccaagacaatgagatttgacattcactccattcggcatggacatccactaagtgattaggtgtccatgattggtatcattccatttttcctgccgtgcaacaagccaccccaaaacttagtagcttaaaataacgtcttatcatcgctcatggatctgtggcttgactgaactcaactggctggtttccacttggtgtgtctcatgcaatgcagtcaggtttgtctggagtggcagtcatctgaaggcttaattgggctggagtgttcaagatgacccagtcacacgattgccagacaatgttgcagctcggctggagctttcaactgaaatacctcaatgtggctggggagtttcagtgtagcatctgtgttctgagaaggggatacccaagagtgcaggacactatcaggcatgttaagctgagcctggaatgggctcagcatcacctctgccatgtgctactggtcaaagcagtcatggggcacacccagactcaaaggagtacaaagtagattattcctctggaagggagtttggaaaagttacactgcagaataacatgtgggataaatctttagaaaatataatatgctgtaagtatctaccttcttgactgtgaagaattatttcttgcctctttaaatctttctgagttgttagttgcaaatcgagcatatgaattgtgaactttcaatcccacataacttccagaatgtcttcatttcaaatacatgttgattggtcagagaaaataatattttttctaagactctaatcaccacattcttcttgaaagtaatgtccagtgtgggcgcaccaagtctgtagagagtccacataagacaaatgcttgccataccatcttctcatgattcattcatttattccttaaatatcttagtctcaggcaccatggtaaatatttgggatgcgtagataaaaggcacagtctcttacgctcaagggtttggcagccataagagaagtttattcacatctcatcttacagacgcctggggagttggagttaaaattcagcaaataagcttaaaattgcatattttcaaaattactctttaaaatcccttaggaagtcaccactttgtatactgtctcacaacaagcccaacacagatgtttttcatccattgttggaaactgattcttgttttattttatcaagcactaaataaaacagccacttggcatataggagccacttctctgctctcagcactcgtcctctggactgaactggcctcctggttggtctccctgctccctcccttgcccacctacagccagagtaatcctgcttacgctgaagttcgatcacttcactcctcagctcaatagcagccaatgcccatgttactcagaaacacatcaaaagtcctttctgtagccattaaggcttcacatgatgtgactcctgtctaaccttccaacatcacctctaatcatgttccccttcactccctgtactccagacacacgaacacttcctccttcatgccaaacccagttaggcctctggacttttggattccctgctctttctgcctagaacatcctttccccaattagcccattcactgattcacctcattcagtttactatttaaaaggaggctgggcagaaagctcgtccctgagcacactatataaaataacctcctctctcattttctgtcctccttatctcatcttatgtatcttcacagcatttgtcactacctgaaattgggcatctgcctccctcactgaaatgtagcctctatgagggcagggctttcattagctttgtactttaatgtattcccaactcctaggatagtggccagcacatggtgttcaatgaatgtgtgttgagtgaacgacaggatgtgtggatgggttagttggatgggtgagcagaaaaatggatatacatttatgcattgataaatagataccacctctgggtggtggaagctgtaatgtgccacccagatctaacatttttaggactgagatacccatttctctagctaccaggagaactggttgctattggcttccagccatggcctcttcagtaattgccgtgagctaaaggagcttccttgcccaaatttgtgcccccttcctagggtcagcttgtatctattgactggttgagttggaggtgcataagcctggccctcttgactcatttggggacaattctaaagccttggttgcaattgcaacacagtttaacttctcgttacccaattctgctccctcactctaaggatgttggtcccaagatcattccccaataaatctcctgcccccaaatctccatatcagagtctgtgaccaggagacctaacttcggacagtatggtccaaaaatacactttaaaacactggaatcacatgcagtttagggttttctcgcaccacaagaaaaatgtagaaactgagaaaatctaaatagtccatagattgaaatcttccattttactctcatcccaaggcacttgctcacaagtagaaatgctggcaaaattgcacaactcatttgaactctgctgctcctctttcccctccctctgtctccctgtgtgctcctctatttctctttccacacagctcatgcagttgagcccaactacattaaacgtggatatgatgctatctcactgtgtccactttgaccaggaaaggtatctcacccacagtagacaggcttgttgtagagtctggaaagaacatttctcttcaaaaaggggcaagctagactctgatatacatgaactctgcactgctaatggcaggaaaatcagcaggaactcaaaagatgtcctaagagcggccaagaggcattgcatgaggtgaagtcaggaagaagctgaagcatttgaaagaagaaaatacacacaggaaaaaaagctatgagacacagagagagaatgcaggggagagggtgagggagccagccattagaaggggaagaacaagaaacatccttttctttttaataagcatatagggtacaaactttcagttataaatgagtaaattctgggaatctaaattacaatattgtaactatagttaaccacaatatagtcgagtattgtttacttgaaatttggtaagagcagatctaaagtgtcctcactacatgcacactcaaatggtaactatgggtggccatggatgtgttcattacttagactgtggtaatcagtacacaacatatgcatgtgtcaaatcatcacattgtatacttcaaatatacacaatttttatttatcaactaaatacattttttaaagcatgtgttcaaggataatcaagaacatttcagccaggcatggtggctcaagcctgtaatcccagaactttgggaggtaaaggctggtggatgacttgagcccacgagttcaagaccagcctgggcaacatggtgaaaccccgtctctacaaaaacccaaaaattagctgggcatagtggtgtgcacctgtaatcccagctactcggaaggctgagttaggcgagttacctgaatctagggaggtagaggctacagtgaactgacatcatgccactgcactccatcctgagcgacagagtgagaccctgtctcagaaaagataaattgccaaaaaaaaaaagaaaattttcatgtaatattttttgtagtagccaaattatctaatagtccattggtaggtgaagattggttaaatatgttacagtatacccatattatgagatgctatgaagccatcaaaaataaagctgctctgggcggggcacagtggctttgggaggctgaggagggtggatcacgtgaggtcaggagtttcagtctcctgaactcatggggaaaccccgtctctattaaaaatacaaaaattagccaggcgtggtggtgcaaacctgtagtcccacctacttaggaggctgaggcagaagaattgcttcaaccaaggagaggaaggctgcagtgagctgagatcacgccactccacttcggcctgggtgacaggcaagactttgtctcaaaaaaataaataaataaaaataaaaataaaactgctctatatgtgaaagaatgaataacatttagcataaaattttcgttcctattcaaaaaagtgagaagcacagagaggacagtgaagtgagtagggaagccttagagtaggaagctatgggctccagccactcacctccccaaaactttcttgggggctgattgatgatccagccgtatgtatgtcctgaggcccagatatactgtgggtctcctagtcccacttgttgaatttccccatattcattactactcacgtggctaggattattatttttctaattcctgtaaatattctttcaataaacccagtatgtgaggcttttggggttccttaaaccccaaaatatcttactggcaaacataattattacaaaatgataatggccaccattactattatatactattattacatatgttatcacataccattattattacataccaggcattcactatctcataaatccttatgacaatttgaaagagtgaagaacctgagtatttagaaagagtgtccaatactagggaattggttggataaattattgtaagtcaggtcagtgcagctgaactggattcaaaactagctgtatcagattctatatctcaaaccagtctgattcttaagcatgtgttatagtggctgggctctattctgcagcactaggtactatcagaggaagtggaaggaagacagaggaagacatggagctaggaggagggccctaagctgtcctgagtgtcacagttctgcgcttagttccaagttggaagcccctggctgatccctggtggatccccaaaggccagttctcaagagggtttgcctcccagtgaacccttggtctgagagaataataatagtaccgctatgcagactgaccatgaagaattcaactatggattctttttttttaaacagagtctcactctgtcacccaggctggagtgcagtggcatgatcttggcttactgtagccttcccctcccaggttgaagctgttgtcctgcctcagcctcccaagtagatgggattgtaggcatttgccaccacgcctggctaattttttaaaatttatttattttagtacagacagggtttcgccatgttggccaggctggtctcaaactactgacctcaagtgatccacccaccttggcctctcaaagtgctgtgattacaggcatgagccaccgcacccagcccgattatggattcctaaagaaaatcagacaaaagactgaaaagaaaagtcatcctgtcgcttgctctgctaggccatatggttgaacaaaaaccatgccacagcaaggttcctctcactcacaggtgattctaacatccatttacctaaccattcttctttttctgcatacatacatgtgcattttacaactatgccgtctgtgttaccatagttatggtcctgtgagcatttccataaaaatgacagtaaatctttcttttctggggttcataaatagcctataaaaactaggtctcggttgaaacttattcccaacagtttccagccatgacactaatagagttcattagcaaattaagcaaatatcaatttacttggcaagctaaaaaagcacaaacgtttactatttccagaggcaaacaggcattcgtaaaggagaaaaataaactaagtcccagcataaccaaaattatagacttacccttaattttaatgtctgtaagtcattcctttgattaatttaaaatgttaaaaagtcagattagtaccgtacaatgtacagatgtttcctgtttgcatttgctagagatttttttataataaacaacagaaatgggaaatggctaccttaggccagatggaaatttaccacagggattttcaggatcacacgggatcattggaaagccggagaggatgaggaggaactgaggttgaattggatggaaagcagatccaaattgtcttggcagcagaaactgctggacagcaccttttctgaaatgaaggcattctaaccctttcacttctatcctcagcctttcagtctagatttaaaatctcgtgaaagggtatggccagccaagcctaagttacgtggctgctgcctgttttgagggcatctgatcttgatgttcccacaatgggggatggtgagtttccagctgtgtcatttacaaatgccaagaaagagatagagacaaagagacagaaaggagggaggagagagagagtgggagagacagtgaggaagaaaaagaagaaagagaaaaagagagaaggggagaaagaaagaaaatagataaaaccacataaatatccaatacttgataattagagggataaattatgctaaaaatacacaatggaatgccattcaatcattagaaattatgttactaaaaaaacatgtaggccaggtgcagtggctcacacctgtaatcccagtactttgggaggccgaggcaggcagatcacgaggttaggagttcgagaccagcctgaccaacatggtgaaaccccatctctactaaaactacaaaaattagccaggtgtggtggtgcgcacctgtaatcccagctactcaggagcctgaggcaggagaatcacttgaacctgggaagcagaggttgcagtgagccgagatggcaccattgcactctagcctgggcaacagagtgagactccatctcaaaaaaaaaaaagcaatgacttcaaaagctatactcaatacagtgttaagtaacaaagtaagttaacagatagtgtgttcaaaataatcctattttagaactaaataaataactgaataaaataagaaagcgtgtgtgcctagaagaaaaactggtgatgggatttcaagttatttctttcttattttagctaatctctgtgatctaagtttttaaaaatagatctatgttgcttttgaaaaagtgataaaaagtgaaaagaactttagaggtttcaaaactgcatcttgagtctctgaggtaaatctaacaagtactgtagtgttactatcccattccatagatggggaagttgaggtatagagaggatattttcatacggaatcacaaggccgaatcaagataggagccaggacattcacctcaatgtcttggttctctttcactaacccacaagtggtcgtcttctaggaaacgtggagtcacctggtcgtgacctttgacaaaagggtaagaactgggcattcagttctcttcttgtgagtcaggtcagcctctctacttactttagctttaagagctgacttggaagccagtaaagcttgggctttttctcctttttttttttttttttttttttttttttttgccagagagggcaattgaagtggtattggaaattctgagtgttgtatcggaatcgcctaatgttatctttctcatgccattttgaaatcatctctgtgtctgaaaggtcacaaacagtggctaaatagcattgatttccaggcacttacaaatgtacatgacaactcctgaaaggggctttcatggattgaagagcagctgagccaatgggatgcggttggtaaatatcttctttgaacaatgtggactgagtcattataaagaaaataaatctgtaggcgtatgtcaccagcagacatgaaatggagccgtgctttcctgaggtgaaggctgcaacatccttaaagcccagctgacctgggccacagcttggggacggacatttgcctgcacagacaccacgactgccttaagaaatgagctcctccctccatgcccccaagggactgcagttccataacggaaaagtgaattagacttagtctgtgtggggcagaggcacaaggttgatggatgttgcttttcactgtgaattcagaaagctcttagaaaacgcggtcaaatttaatttaaatgcttttcatttgagatacttcagtcagtgccagggaccgatggcaatttctgatttcaggacatcagttgagccatgagcccaccttttttcctagcaagaaaagcagtggagtaattcagcagcgggtctgtctcacgtggccccctgtgcctttgcacagtggccagccctcatgccccacaactaaatatgtgttgagagcctcggccttggctgtgtgtgagggcacagtgggctccagtcccagggaagggaccacattgaaagcccaagcaagtgagtttgttaatccccttaaccaaatgccaaattaatcagaagaaatctgtattccaatagagatgactcctgcctactgtgtggatttctattgtttgctttttcctaagcatttaggtaagggtactttcctggattatttcctgtgtagcatcaagttttcgagaggagtaaaaggaacatttgatctcatgtcagataggcctcaaagtatggcgcagggttcctgaagggtcccccagatcctcttggggccacactaagtaaaaactatcttttaaataatgctacaatgttatttgtctttttcaagctcattctctcacgagcatacagtggagttttccagaggctttaagacgcataatgttatcatcactctgatggccatggagtgtgtgcttgtgtattcttgtctttcaaaattctctgttttaatttttacaagataaatatttacagaaatcacctgcataagcaaaatctccttgggatcttcggtaagctttaagagtgtttgaaaaccgttgatctaatgtttttagacaattagatctgcttcccaatctgttgacaggctgtggtgaagattacattagatgaagttcatggcattgagacaatataccaaaattcatccttctctgctcaaatgcagccattgtttcaggttgatctgagcattcaactttaccctttatgggagtatcatgcctgcatgaaaatacccattgccccctctccataaggccatgccctcagctccaggcctgcccctttatccaacttcctactgcagccttctctgggtatcatttcggtagatattaggtgcatggtactttttcaagggtatctatctagtagacaccataagaccatacccccatgggacgcagccagagtctttctggaaacgagtggtcacttctggtatcaaccactccaagatgcagaaggttttcagacagcaaccagatcttggagaggaacttctcagtgtctttctgggtctcaccttattgggctaggattgtttaggatgtagtatatttgtgatggctcccagatgtggaggtgagatggtatctggcacttggagagagacaagaagcctggcagacgggacacctacctgggcagatttcttccatcctattaatccccaaacactctgtattaacttctcagggatcattggttcttcagaaaaatacagtccccatttccctcattctgtcatgtgtgagatcctgacacacccatttcctctacaggaggtcaactctattctgtgtcagaaaaaaaaattgagcaggaaaagtctcatggcaggaaaacccaccagagagggtggggactgagaggaaatctggattggacagatctttctcaagtaagaatatcaggatttatgatcgagtagacgtggggagtgagggggaaaaaagcaactctggctgactccaagggtctggcttggaatacaggactaatggacagagaccattcactgaggcagagtaatgaaagaagagctctggattaggaggtaggaggaaggacgaagagtcgttagaaattctggcctagattgtaggctagaggtcagccttaaagtcataaaatggcagctgaatcccggagggagtgtgctctgcctctgagacatttctgaagcaaattcacagcagaactcttggtggaagaaccaaggtggcagaaaatcagccatctgttttgcaagattctatagagtccttgttgctgaatcttgttgttgactgcctttcctgatggcacttctggttccctgacttgatttcccctttggccttcagatctgcttttgtaccccaaaacttggctctctccctctgctcctcaagtcttccctctttcaacactttccctcctgaatccactgggaaggcttagaacatccaaggcaaacactctataactggctctgctgctcagttccccacacatcctctttttttgtacacttccaagaccatctcagaaaatcctttattctctctttgctgagtctctttattagaaacttgagggagggggagaccacacagggagggcatgtagagcaagaagaggaaaggatctcagtagaatatgaacaataaggcaaccattagcacacttgaaagactctccactttcttctattgtgtgcttttctgagttttgttttcaagggaattatcttaaatagcaaatttaaagaatttatgtcatttggtaaatttgtattagggccagatctcttaccctcgaaatgattcaattcattatagcaaatgttattccattcaaaagtcaaatgtaacaacagaacatcagaaagaacaaaaatatctgcaacctgcacagtggtttctttgtaacaaatgtgtgtacaaataatgtcttctattttaagaatgtaggtggtcctttataattcactactgaccaaaatttgttgtttactagatattttacatgaagatgagaaattagatgaggtagggccaacagtttgtttaatttggatcacttgcaagtttttgctgagtgatgagtaaactaaacgaccatacttgctaaatttcctaggtaggtggtatgaaagtgagttaggaatttggcaggacttatttcacaagataaaggtcacaaagaccccactgataaaacagcttgtagtaaagaagccggccaaaacccaccaaaaccaagatggcaatgaaagtgacctctggtggtcctcactgctcatatgctaattataatacattagcatactaacggaatttcccaccagtgccatgacagtgtacaaacgccatagcaacttccagaagttatcctatatggtctaaaaaagggagaaatcctcccttccaggaattctccatccttttcccagaaaactcatgaataatccaccccttgtttagcatatgatcaagaaataaccataaaaatagccaaccagcagccctcagggctgctttgcctatagagtagtcacccttttattcctttaatttcttttttttttttttgagatggagtcttactctgtcgcccaggctagagtgcagtggcgtgatctcggctcactgcaacttttacctcccaggttcaagtgattctgctgcctcagcctcccaagtagctgggactacaggtgcacaccaccatgctgggctaatttttgtatttttactagagacgaggtttcaccatattggccaggctggtctcgaactcctgaccttgtgatccgcctgcctcagcctcccaaagtgctgggattactggcatgagccaccacgcccagcctattcctttactttcttaaaaaaaattgctttcactttactttgttggctcactcttgaattccttcttgcctgaagccaaaaacccacgtggcctcctgagctgagctccaatttgggggttctccatgtgataagagtgtcagaggcatggtttatctgtcaattctgatgtaagtgacaatttgtaagttctctgaaatgctattgtcaataatctacttgaaatggatgaagaaacttatacaagtcagaataggctaggttatgctgcagtgacaaacagtccccagatctcaatggtttgagtagcaaatttaagattcatgttcattggtggcagatgaaggagtttactcaatgtcgtttacgcagagacccaggctagttacagcaggaggagggagagggaaaatgaggaatcatcattcactcttaatcccggaagctacaaatgttattttgctcacattgtattagcccacaagtcacacagttggtctaaattcaacagagaactggaaatagaaagttaagtattacattatgaacaagtgtaaaatttaacagaacagaaataaagatgtcttcagttttaaatcctaagctcatcatctaaatattccacacgaagacaaaagcaaagagaaaaataaaatattgtgaccctagacacatgttgagaatttgaattatatgatgtttagaagtaagatatttggggaacaaaaacatatattcacatcttactttatcgacgaaattcaagcagtttatgtgacttgcctaagatcacacaggtagttagcagtatagcagtctttgaaataggaactctgcaaaggctaaattttaaaatcacgacaataaaggaaaggtttgcatgagaagcattttatgtttacaatcattaattacttctttattctttttgtaaggggctaattgccacttacatccaatgggagtaaaatcaaatcactactcagcaacccccatgctcttctgtcaacatggacaatctcaacagataagcagctgcctgttactttctctgtgagcttatccttcaagcaaagcctcagggtaaagcctaaacatatgtttaggcatgacatttgaagttaagtacaagggttgggaaatattaaagaggcctaagagagcctgattcaccccaaatagagttctccaataatcatgtgctcttaatattccacagaggaaataaaagagatgggaaattaattgcagcacaaaataccttgaccataaactctggcataattaatttcccttctgagcttgattaacaatcaaaaatggaataagtcaccatgcatgcttttctcataagacctattctgttggaataaaaaacttgtctccaagaatcacagagaaacataaggaaaaacaaaaaataataaagcaaatccatgagaagaaatgacgcctctgtgatgaagcctgaataggcttgactgaggatattttaattgtgttttgacaatgagattgaacattgaggactgtggctgaaaaatagcccataagaaatcagccatgtttttaattaagacacttatggctcacctggttgtgattctcctataagttgtagaggaacaggaggtaaattagtcaattacggcatcttggaagttttcttctccaaacatcattccactgtaggaccttctcttgacaatctgcttgatgttcactttactgcaggtccagagattgggtagctcacagcaactcgagctctgaaaattagcaggtttttctttaaatgaagctgaaatttgcctcaccaaaatttttctaccatttattcttgtctgtgtccctaaggtgaggcagaaaaagcctgtcccatctgccactactttttcaaatatttgaaggtagtttttatgtttccatttgaattttcataacacataaagtgagctacatacgaaaaatcttatggatacctcaagtgtgtcaaggtacttaagtagccagaccatggttctgtactctactcatctacagagagtgtggcccctgagaacatacatgctgtcacatgtgggaagtttaccctccacctggctgggtgtatttcctggaaaagacattctggaaagagagaaagcaagttggggaactgagaccctaagggcatagccattggtagcagaactttaatctcctcgaggtgcaagtggaagttagcctgtcatgacaatgatcaggacgcttttggccacgctgctgttgtggtttgtgctgctgctcttttgattgtgttagaggggatgagtcatccctctcatgccctgtggtcacctggttgtgatgatcctggtgggatcctggtggctcctggtgctccttggggttgagaaggataactcttccccctaagcatattgtttcttgtttagctttatttatttatttatttatttatttatttatttattttttgaaatggagtctcgctctgtctcccaggctggagtgcagtggtgcgatctctgctcactgcaagctccacctcctgggttcacgcaattctcctgcctgagcctccccagcagctgggactacaggcgcatgctgccacacccggctaatttttttgtatttttagtagagatgggatttcaccatgttagccaggatggtctcgatctcctgacctcgtgatccacccgcctcagcctcccaaagtgctgggattacaggcgtgagccgccatgcccggcctcttgtttagcttttatttaataatcatgaaattaaatgtgaagtctggctagacttggaaggaggtaaggcaggtatgaagcctgaagaactatagcaaatgagacctcaaagattatgggatatgagaacagactgggagtggggctgctctccttagctgaagaagacattgtttggtgataaaaataacataaaatcaaattatgagagttactggtgcagcagtggtaatcttcctgctgtcttgccaatcctagagcaaaaacattccatagattccacattattcataccaatgaccataggcttgccatccagcctatggtccagccaatcagtatgaatagtgtggactaaaaaccaggaaccatttgtgttgggcccatcatttgtcatgaataagatcccaaaactcatatgattcagcatgaagttctcatcaggaaatttcttcccatggatgaacttgccaccagagccatgatggcaggtgaattccccaccctggcatataaactgtacaataattctgtgaaagcataaatcttataactggctaggcgcagtggcctacacctgtaatctcagcactttgggaggctgaggcgggtgaatcacgaggtcaagagattgagaccagcctggccaacatggtgaaaccttgtctctactaaaaatacaaaagttagttgggcttgttggcgcatgcctgtagtcccagctactggggaggctgaggcaggagaatcgcttgaacccaggaggtggaggttgcagtgagccaagactgcgccactacactccaccctggtgacaagagtgagacgctatctcaaaaaaaaaaaaaaaaaaaaaaatctcataaccaaacccttttcttccattgcaaaaagcactgacattttctgctatcctttggaacctggactgaaacagcttgaaagagatacagtgtgggttctccaacaatggggatgtgttgcattatacaaggggattgaccatggctaggagcaggggcagagtggactgcagtttctgcctgttctccagtgccttcagtatacatatgatatatatgtatgtgtgtattcatgtcactattgcttagaatcagcttcaaggcagctccacagttcaaatcttcaatttgatagttgtcttagttgtgtgactctgggacagttttctgaagtataaaatgaatagagtaattcctatcttataaaatcattacgagtaataaataagagagtgaatgtagtagtcatacaatcaatgcaagtttactctccccacttcagccctaaatgagcacgtggctaattgtcagatatagacgattaagtctgtcagaatcacatgaggagtttttgtttgtttgtttttggtttttaatggagcattgcaagattctcagaggagattccgtagttgggcagggatggagctgagatatttaatgatcttccccatggaatatttctcagacagctcagctatttttccagtcaaattgatgatatactttcctttgcttctgctgaaaatattcaagcattttctgaacaatggttatattctgactaatttgctgtagcagttccagtgtctatttaaggaaacaataaataaaaaacagtatcataaaactatttataataacaacaataaattcaatagcatataatttattgttgaagtttcctagcaggactgaatgcaaagctgtaagagtatgtacagaaataacttggagtttggagtacatacacagaagtttattaaaaggagaccaaactaatgtacaattgagcatgggaaccaaattgtaaacagatccacaatttcttactttacttaccagattctgcttatattatgtaaataaccccctaaagaagacacagccataagtgaggcagggtataatgaactaactttggtgttgcttggtagccattgaccgtgaggaatatatacaatagagtgcctgttccaagcatatttcctgtaaattgcctgttttcttcttgaaagtctcatttcttcttatacctgttttcttcttgaaagtctcgttagtatctgcataacttggtgaccagtaagtggattagcggtgcctttcaaagtggattactgttccttatacatttaattaaagtggacctcattctatcatccttaagagcaaaattatgtagagagaaattgcgtatgtgcagacattgactacaaatatgtctcccccttgggtccttaatgtgatctagttggctgcagagatcaaaatttctggaataccatacaaattctgtgctttttctcctgagaatagtggtttcagctcctccatgagtgggaagaggtgtgcagggtcatgtccctgaaataatatggatctcacactttctcataatgttccacttgtaagtcatattgttaaatggaaaaaaaaattaatatccttttcaagttgataaacttgaaaagggagaagtcgatcaggatatttctctgccttatagatatactcaggtcattaagcccattatcatcagaaaataccatctcaggacttgttagtgccaaaaacttcaaaagaaattattttatacatgggctaacttaatgctctggttgccagctgggtttccgttctacgtagctgatcttacaatagaaaacattttagccctgagccattttatgccctgaaatgcacttactgcctgactttgttcgtaaagacaatagcaaatgaccataaaattgctaccccagtggtctgcaactgtggctacccattagaatcacctggaaaacaatgtaaaaatcgcatgcctgggcctcactcagaaattctaatttgactagtctggaatggggcccaggaatagtaaattttttttttttttcaaagcaccattgataattctacagtcaaggtagagagctaaggtagagcgccactgttctctccaattcttttttttttttttttttttttaatttatttttttattgataattcttgggtgtttctcacagagggggatttggcagggtcatgggacaatagtggagggaaggtcagcagataaacaagtgaacaaaggtctctggttttcctaggcagaggaccctgcggccttccgcagtgtttgtgtccctgattacttgagattagggattggtgatgactcttaacgagcatgctgccttcaagcatctgtttaacaaagcacatcttgcaccgcccttaatccatttaaccctgagtggacacagcacatgtttcagagagcacagggttgggggtaaggtcacagatcaacaggatcccaaggcagaggaatttttcttagtgcagaacaaaatgaaaagtctcccatgtctacttctttctacacagacacggcaaccatccgatttctcaatcttttccccacctttcccgcctttctattccacaaagccaccattgtcatcctggcccattctcaatgagctgttgggcacacctcccagaaggggtggtggccgggcagaggggctcctcacttcccagtaggggcggccgggcagaggcgcccctcacctcccggacggggcggctggccgggcaggggggccgaccccccccccacctccctcccggacggggcggctgaccgggcggggggccgacccccccacctccctcccggacggggcggctggccgggcagaggggctcctcacttcccagtaggggcggccgggcagaggtgcccctcacctcccagacggggcggctggccgggcggagggctgacccccccacctccctcccggacggggcggctggccgggcagaggggctcctcacttcccagtaggggcggctgggcagaggagcccctcacctcccagacggggcgtctggccgggcggagggctgacaccccacctccctcccggacggggcggctggccaggcggggggctgacccccctacctccctaccggacggggtggctggccgggtgggggggctgacccccccatctccctcccggacggggtggctggccgggctgaggggctcctcacttcccagtaggggcggccgggcagaggcgcccctcacctcccgaacggggcggctggccgggcggggggctgacccccccacctccctcccggatggcacggctggccaggcggggggctgacccccccacctccctcccggatggcacggctggccgggcgggggggcttaccccccacctccctcccggatggggcggctggccgggcggggggctgaccccccccacctccctccccgacggggtggctgccgggcggagacgctcctcacttcccagatggggtggctgccgggcggagaggctcctcacttctcagacggggcagctgccgggcggaggggctcctcacttctcagacggggtggttgccaggcagagggtctcctcacttctcagacggggcggccgggcagagacgctcctcacctcccagacggggtctcggccgggcagaggcgctcctcacatcccagatggggcggcggggcagaggcgctccccacatctcagacgatgggcggccgggcagagacgctcctcacttcctagatgtgatggcggctgggaagaggcgctcctcacttcctagatgggatggcggccgggcggagacgctcctcactttccagactgggcagccaggcagaggggctcctcacatcccagacgatgggcggccaggcagagacactcttcacttcccagacggggtggcagccgggcagaggctgcaatctcggcactttgggaggccaaggcaggcggctgctccttgccctcgggccccgcggggcccgtccgctcctccagccgctgcctcccgggcggtgctctccaattctttttctctctggggtttgcaaaagtgagactttgcacgtttcaataagataaaatctttctttcttgactttttgggttaattaccctaaagaacatttttacctagactaaggaaaacatctacctgttgcatctaactttgcctttatcccttggctttccaaatggcaatgggcaaggtaggcaaaaagggagccgaggggcagagcacttgggaggagagtccaggatttcctcattcctgctgcaggtaagtcaagatcaatgacaggagaagggagagaataaggcgggatgctactgttctaataggcatcagaggagactggttttggggcgggggggttagctgggaggggagaatccaacaataaagaatgaccaagtggaaaatggctgcagggttaaagacagcctgcagacattggtgaccacgcccactgggtggaccacgtgacccatttcccctccccaaccccacccccagagctgttaatgacttgtttctaacttctgcttctttaattgtaacagagttagcaaagcccccagcttcctaggcttgtgccctaacaggacactttgcataagtctatcatgtgcttttatctcacacatacacaaaatctttaccttaaagattggattggccgggcgcggtagctcacgcctgtaatcccagcactttgggaggccgaggcgggtggatcacgaggtcaggagatcgagatcatcctggctaacacagtgaaaccgcgtctctactaaaaatacaaaaaattagccaggcatcatggcgggcgcctgtagtcccagctacacgggaggctgaggcaggagaatggcgtgaacccgagaggcggagcttgcagtgagccgagatcgcgccactgcactccagcctgggagacagagcgagactccgtctcaaaaaaaaaaagattggattgggttttacagaaactccctcagtggtttcaaaaatgatgtactaacaatggcttctctgtgaggcacacctgagaaagcacaaagataatgcaaatgagactcatctcgaggcattggtgatgctgagcaacaaatttagttctgattcaaggtttaccagaaatagcaaaacgctgccaaggggtgttccctcagagaggtcaagacgatcaacactgcctccaaatgttggttttctcctgcaccaggattgttctggttcagatttcccatgtgagctttaagaactgcatgttgtacatgacttgaacagaggagccaactcagctatggagcatctcctttttctacctatgcctttttctaccttacctaggatggcacccgatataacacaaagacaatgcaaatgagattcaacatgaatcactggtcatacctaggaccaagtttacttttgattcaaacttgatgagcaatagcaagacacagcaattacatagccatgtgacattttccagtgagctgtgtctcatatatccatagatttcaggtttatttacaataaacaactgacacagactgggtatatatcctgctaaaagtagttcatagttgagaactcttctttatctttctgctagtaaacaccatttgtggtttgcaggaagtctgcttactcatgagtttgcaagggaattttcctggttcatttctttctttcccaggtgtcccaagtaaaggccaaaattaggtgtcaggcctgctgctaacctttacccttctgtcatctgacaaatttttaaaaacacacccatacccattgacgtctttacttcacgagaaacaactctagcggtcagggcaagattcttcttctctgagtatgggaaattcaaaactcagaaaaattaaatgagtactctaggatcttaaagcaagttggggataaagcagcttgagaaattcagcccttgcttcataatattctgtgttatacttttccttatgggtcatgattctttcccaagaacaagatgtaagtcacccttgaaactcatatatgtatacatatgaataaaccatttcagaagcactgttttaaataatcatccctgtgtaatgtactatgtgctgttgtaactagtgagagcaataaatcctacagctctgagcttcatgggtgacagaggagctaacagatgtctttccagccactatttccagggagaaggggacagccctttgggttgcaataataatgatctattattttatgcaaacttgatagttcatcatttagcatatgtagcatgttcttcctgtattcatctttgagtctttggtgccagccataatataccctgcacatagaaggtgcatattaaacacttttgttggactaaatcatctatatttggaaattcaaaataaacttttgaagtgggcagttcagaaataattatcttcaccatgcaaatgaaggaagtaatgcttaagaaaattaaatagcatttccaagttcacagctagtaggtatccaaatcaggtctcataaccagatctctaagaaggttctccttccctccttctagggcatgtgaatactacagccatgccttcttgcttatttttacaaggccaaggtcagcattgctactcaataatgtcttcaatgcttaggtaacctctgcctctaataatccccagctcaactgttgtcattcaaaaggcagaaactgaaaatgttctagacccttatggtcaataaagtttcatgatgaggagtaaaaactgcgcactaagtgcaaagttccctgccactaaataccccagtgctttgaacaagacccttaacctaataagcctccttttcctcaactataaaagaaaggaaaaatgagatccacttatttaggtgggtctcaatacactggaattatattttctgtcttcatggtgagtgtattagtcagggttctctagagggacagaactaattttatatatatatatgagtttattaagtattgactcaaatgatcacaagatcccacaataggccatctataagctgaggtataagggagagccagttcgagtcccaaaactgaagaacgtggagttcgatgttcaagggcaggaagcatccagcatgggagaaagatgtaggctggggcactaggccagtcttttttttttttttttttcacatttttctgcctgttttgtattctagccgcactggcagctgattagatggtgcccacccaaattaaagggtgggtctgcctttcccagcccactgactcaaatgttaatctcctttggcaacaccctcacagacacacccaggatcaatactttacaaccttcaatccaatcaagttgacactcagtagtaaccatcacagtggggcagttaaatttcactaaccgtaatatcccccaagtaaatgcatgcaaggtcatcatcttcaaccaccttctggattaatctagagtagggtcaaacctcatcttaactcagggcatgactaactcagtgtttaatcacttttgtgccatttagatatgtctctttcaatccttaaattgtggagaagcagaggacatatttagtacaactttcactacaggataaaccagaacaacacagagcttccatgaactaaaacaaaacaaaacaaaacaaaacaaaaccctgcttaaagtttagcaatgagatcaaataaatatccaaacatcacaaagaagaggcaaacaaaatggcaagaatgagaaatggggcaagagaaaagggaaaacaagaaaaaaaggaagcgaagaaagaaagaagtccattgagctcttgaagtattagcctgtgctgggcttgtcatccatgttgtcacactagattctcacaatgaccctgcgaaacagacttggtttgcatttgacagttgaggaaaatgaggctgaggtggttacagactcacattgttccaaggagggtcaggtgacagacacagattaagcgggaagggaacgttgaggccacagagaagacaggaactggtggtgaactaaagagggctctctgcaataaaaaatacaattccacactcttaccagctaaactggagatctttgttggccagattcagctgtggaccgacagtttttttacctctggtaaatgacagctggttcatagaagaaccacccttcaaacttgtgctttggccacactgggctgcatttttcatcagcagaggccaggatcaattttgtcaaagtttattttatttctcttcccattcctagcagctcagccgacttagcatttccaaattctgcaaatactcaatcatgaacatcgtcagacacttggtaagtgagaaaaaagatggaagcgcaaggtgtaatttttctaagacctttagctaccggattaagcatggctgggataagaaaatcagaagccttttagagattcttgccctgcccacttatttcaatttttagaggtgggtggctctcccaggaatgcctttgcttaaagtcatgattgtccttcatagctgtcacaactctatactcttggacaggaaagaagatgacacggtcctagcccagaaacaccacagttaacgcacagctcctctcaggtgcatgtccttattggccaaaacactggaacccagtaacatgtcctctatgggtttaagttttcaaatgcatgcaactgagcaacatggatttacaggaaggcatcttttagttcaaagccaaacaacattgactttcaggtaattcaagtgataaaaacaaacaagagcctacataaaaaattctacagggctcaataaattgtgatttttatcctaaatttctagccaaccaagagtcttagaggtcctccctccaaatttagccacagaagtaacaatctgtctacctagaggcattatttataaatcattaactcacggtagatacatgagtgcatttatttttatctctttacttataatcatcagcaagttagtgtagaagaaagagaccttggatgttttgagggaggtgtataatttcagtgttcttcattccagctgcacagctcatactcacagcatcagttttacacctagaagataaggccaattgaagaaaatgaatttgagtggccctgaaaccagcagagcccaacttggccaagcaattcctacctaaacattaactatttgtctgtaagtctaaaggttccagagcccagacaaaatacaaaaattcacagtcatgggctccatattttgtgctgtcatcattgaaaaggttgtgaggccaggcacggtggctcacacctgtaatctcagcactttgggaggctgaggtggatggatcatgaggtcaggagtttgagaccagcctagccaatatggtgaaaccccgtctctactaaaaatacaaaaattagctgggtgtggtggtgcacacctgtagtcccagctactcaggaggcagaggcagaagaattgcttgaacccaggaggcggaggttgcagtgagccaagatcacaccactgcactccagcctgggcgacagagcgagactacatctcaaaaaaaaaaaaaaaaaaaaaaagaaagaaaaggtgtgaaaggcacatttcctatgagaaaatgtagcttttatgatgcaggtcttgtcttcttctcctcctgattataggcacaaaacaagatattagtgagcagacagtttattagagttcattatacactgatttacgttgacatgctagatgtgttttatacgatctcctgagccttcccgcctgcctaacgtaagcaaaaattatttgtaattaagctattcattaaaacaaacatcatcagtgaatgcgtactatgtgccaaaacttacatcaattcctttgtatccatcgtttcactaaaacatcacagcaggccaggtgcagtggctcgcgcttgtaatcccagcattttgaggccaagccgggcagatcatttgaagccaaaagttggagaccagtctggccaacatggcaaaaccctatccctactaaaaatataaaaattaggtggcgtggtcatgcacgactgtaatcttagctacttgggaggctgaggcatgaaaatggctcgaacccaggaggcagaggctgcagcaagccgagatcatgccactgcactccagtctgggtgacagaagagtgagactctgtctcaaacaaaacaaaacaaaacagcaattctataacctaggggcaattagaattccaactatgcagatgatgaagaaatcagctttagaggggttaagtaatttgtctgaagctacacgtctaaagtttatgagctgggatttccatccaggtctttctgattccaaaacaatgtctatctctagcactgctcagctttatttatttattttttaatcacttttctcccttctccaattttagccacaacttttcaggcacctcaggccagtgctttagccatatcacagctcccaaaatatatctcccccaaggcacaatcagtttttctgcaggcagataatagtgtcaggattctgacagtggttacctgacctctagcattcaaagaaaataaacacaaaggagtgacccttcactgtgatactgccagagctgtgttgatgtggaagatagtttgggcttagaagaaattgcaaatatgcctacaaggaaggtgttattcagggtcatttcaatgtggtaaatccattgaccattggaaccaattcttagcaaaaaccaaatgaaatgcacctactgagaaatcctgacaagtcaatcacattcttcccaagagttgctgctaaaaatgtctgtgactttggccaattcttggtcacatgggcaagaaactcccaaaggggaacaaaagtatgacaataaggatgagctttcctccacgttttccatacacaaacttctcctatttggaaatgggctccgtgggtgatataaggaacaaaactctgaagtcagagaggacaggttgtaaataccagctcagacatttactcgtgtgaccttgggcaggaaagtgacttcgtctcactatattctttagttttctgatttacacatcagggataatatcgcaagttaggtttcccagaaacagatcctaagatgagaatttgtattactaagaaagtgctcccaggggaaattggaacttgagcgggggatgcaggaggggaaaacggaggaagctaagcaggtatgtagtctcaggcaaagatccagcagacagaggatagcttcagcctaatgctgcggagacctctgcattgtaaattacacctcagagttggccttatccaaaggagctggggccttcacatttctgtatacattagtcattggttaagggtggtgggaaaggagggtagatgtaaattctgaggcacttccagctctgcaaagcaaaccccactggtccaaggaaaatcttaggaaataatagctagagatgcttgctgttaaaagcaagagcacattcaaaccagaggtgcgcaaaatgggcaaaatgggaccccaggttgtctgagtaaagcaccgacattgtccaccacaagtaaccatacctctcttgctgggttattatgagcatttataggacacactcgataaatatgcattactgttgttgttgctgttgttttactaaccttgcccataaaaccttctaaagcaggtctctccacactcacagctgacagtcccactaactggacttggtgatgcccatgtgctgggtttgccagtgaggatggtgcctgaatgctgatttcacatcatcagctctctctaattggctctgtgtttgttgcccagtctcatgaccactgtccttttgggatctcctctactgaatcaaaaggccccacttcttgccaagagggatgttcttgagagagggacgtggcagaagtgccaggtgtgagtgctgccttctctctcggtgataccactggcctccagcaggacttgacagtcccaaatcctcctcttattaaataaacccttgaccttttaaagttttgcctattcatcttcctcccctaagagcaagggatttcttggaatccacaaaagtgcttcttttccctttgtgcctgaggttctatccctagagaacttgtgcacccccttcctccctagggagcttaagatacccataggaacaatggggactgctctttatttgatgaatcttccctaacaaccagcctttcccagctgcaggccaggcaaactcatctgtgagggagcctcccctctgggactaatcctccacgttaaaagattgcgcctttctccaaagccaccctttatacacatcagttcacaagagctgcatcttctcacaatgcccgacagcccccttggccacactactccaggccctcattttctgggctgccatcatccctgaaattaatctaagagaggccccttttacaagagtggcagcaaatatccgattcaatttgctttcacccaagatttcccaggagtcatgccgaatgagataatcaatgatgattatagggtttggcctgccttactgagccaaagtgttaaaaagggggggaatttctgctccggtgcttacccaagtcaggtgctaattcgggcagatccattacttttctcagcagctctaaaccatatgtgctgcaataatcacgctggataggtagaggcgatcagtcctcccacctaagcaaagaaaatgcatttttgcttctccaccccaaaacaacaacaacaacaaaaatgtatagagcatctgcagcaaaaatgagtaggctgttcaaaccaatgatgccgaagagatttaatttagacaggctaaactgtcctcgtctcagctagagagactagccaatgcctttgctactaatccaatcaagattaagtattaaattacttgttgctgccatcttaacccagagaagactgttttctgcttggctgattgttctgaaagaccacaacctcctgggaaggaaagcaggagggaatggccgaggggccaaagaaatcctccagattcctcacacccgtccttgtcctcacccctctctttcttgctcctgttagtcttatactggctgttttggggtggggtgctcctgggctatgcacatttttgcaaagcctgtgtattagtctgttcgtgaattgctataaatacctgaaagtgcgtaatttataaagaaaacagatttaattggctcacagttctgcaggctgtacaggaagcatgacttgggagacctcaggaaagttacaatcaagacagaaggccaagaggaagcaggcatgtcttacatggctggagcaggagaaagagagaggtgtggggtattacacattttaaacaaccagatctcatgagaactcaccatcatgatgactgctccaagggggacggtgttaaaccattagaaaccaccccccatgatctaatcacctcccaccaggtcccaactctaacactggggactacaactagatatgagatttgggtggggacacagatccaaaccatatcaggctggacccaaaatatgtgttagttatccattgctttgtaacaaatgcataccccaaaacttagaagctggaaacaacaaatgtatactctcactgttcctcagggtcaggaatgaaggagcatcttggctgtgtggtgctggatcagagtctctcacaagactgcaatcagaatgtcagccagggctgcagtcgtctcaaggcttggcttggggaaagccagcttctgagcttatccactctcccatggctgtgggcaggcctcagaagatcagcttccaagctcacagatgtgggcctttccacagggctgcgtcacagcatgatggctggattctcccagagtaagcaacccaagagagagtgtaagagcatgcccagaccaaagccacagcttttttattacccaatatcagaagtgacatcacaccacacctgcattattctattggttagaagtatcagctagtcctgcccacactcagagaagaggatgacacaaggatgtgaataccaaggagagtgagttattagagaccattttagtgatgactgtgacaaacaggagactttccctcttgtagatatcatctgcacataaacaatgagaagttttgtcctgttagatgcagcagagttcttacatgtctgaggcaagctccaaaggcagtttcctttttgtggtgcaaagaatgttacatagagaaggaaagggcatctgcacaaaattgatctggatattcaagatcagaattagacctggaagcagggcctgctttcccaaaaacttcactaagggcagtgggctaaggatgtgcatgttggcctaggtgctgcctgggtaccctttctagcacccacagtcagaagcacacacaggaactgcaggttaggactgcagagacatcaacaggtagagaagaggacagaagacctgggttagaaaggtctggttggtgatctcttttatccttctgtgcaagatgattacagtcatagcccaatgaaacacacctctcagtatccatacttttctgtattcccctcacacactgactctgggcttgtctatgagtattgccaagttaactaggtgtaagcagaggcttgatttgtgcttatgaatttgggcataccctctgggaatgctcccccgagaccatcatgccaagaagactccaggatgtgaagaaactggaatgaaagacaacatggagaggaagatccagccgacgtagctgagcccagtcaaccttccagctgaatgcagctacatgagaaatcccaggtgagaccagtggaagaatcaccgtacagaatgttaaaatagtaagtcactattatattaagacattaagtcgtgaaatggtttgctaatactgcatagttggtgatacagaaattgatacctggaggtggatgctgctattcaaaataaaattcaaaaaaccatctttattaatgtggcattggctttgggactgggcaatggacagaggcttatagagaattaaggaagctattagtagaatctagaaatgcattgagaaaactgctagtagaggctggaaaaagggcaagccaagttacaattgaggaacaattggcaaaactcttgtctgaagtaatttgaaagacaggaaatgtactaatgaatgtgtgggtctccctaaggagatgacgaggcagaatgctgacaatggttattggctttttctagctgagtatgataaggaatgagaggagaaagagagatgtactaaagtcatctctatttgtaagcagaatttaaagaaagtacagaggacctgatatatactgagtttctaaatgaagttggttttgtttgtaatatttctagtcttttcaacaggcaaaagattctcaagggaaaaatgaaaatgccttcaggatcacaatcaaatcaagaatgtagatataagactttctgaaaaattaagatgttgtctaatagaccttctcagctagacaaaaatcttaagggccttgtcctacagcagcaccctgaaattccccatccaagtacagaagaatctatttcaaacatagttgtgaatatggtttttgtttaatggagtataatgtgatgcacagaaaacccaaaacatttttaaaggagttgtagcagcttggattgaagaaaacaaacacagtttaaaacacaaagaggactgtggtccccaaagtttacagttagaaagcaggctaagaaagctacaaacatgaaccctctcttatggaaggaaaaagaaattcaaagagtagagccaagagactagaaggtgaatttaagggctaaggaaaacagctgattttctgaatttaagggccaaggaaaacagctgattaggaaactactcccagagagcagggcctagtaaaggaatattccctgccttgggtagagagctctgatgacatgtgactgtgcctgtgcctggctagatttcagaattgctatgtaccagtgactgttagtgcctcttgctcttctccttttgaataagagtgactattgcatcatctagtgcctgtcccttggtgctttaaattcacaagtttctggatcaagaggatctgctgcactcaagagactttttctgtatccagaccagatgaagatcacaagctccaggattctgagccttatgctataactgagtgagatctttgaagatcttgggaggggtaaatttattttgtatctgggaagactactagtaattgtagtcaaatggaaaactgtggtaggttaaatatggccacagagctttgcagctagctcctcccctcagaaggttgaatctattccgacctttgggtttgggctgggtttgtgactcaatttgcccagtggaatgtagaagaagcaaaactatctgtgtccaaggtctagtcctcaaaggggccttgcagcttcctccatcatcccctttgagcctgttataacctcactgtaagaaagctggtctatttggagactagaatccacatgaaggagcatcagggtgtcctccctaaaagcaccaactggactcagcaaaaacagctgaattccactgcaaacaactctttgacttaaacaagattattctgagaaatcacaaaacaaaagccctttttaaaatcagggcttcctgagagtccaggggaattggaattgtgtgattccagtggcaactggcagataggttgaggaaggccatcttggaccttgcagccttgctgactctccagctggatgcagtcccatgagtggggcccaaacaaaactgtcagaggatcaacctagacaactccaggaattatgggatatgataaactgttgttgttttaggctgctaagtatagaggtaatttgttacacataaatagttaagtagtttactctcactaccactagaacggtcagacttacctgggcaggcaacaatggaatttagaacaatcctgtggtcctagaggcccccaagccagaaagcagcacctgcccgacgcctgctctttctcttttagttatgttacagaagtagtttacaaatgtctggtgatccttttattccccagaggcaattggactcagcaaaaacagctgaattccactgcaaacaactctttgacttaaacaagattattctaagaaatcacaaaccaaaagccctttttaaaatcagggcttcctgagagtccaggggaattggaattgtgtgattccactgtatgacgctcagtacagtggctgtagcgccataaggtcacctgcccaggttgctttggaggaaaactgcttttgatttcaccagcaggtgagcagactggatcactttggtgacttgaatgtcttgggatgctatcaggccatccttctgctgttaagaagtgctgcctggacagcacagttatcacaaaaagaaatccttatccattttttccctgggattaagcctgctctcttaatcagtatgcagagtgaaaacccactgggacatgagggacagctctgtcaccctgctgtactgcctggtaaaattccactagcttgtcaagatccagcaacagcattgcttcctctgggcaaacatcacttgctttcattccactcccccatgtggtagaacaataatgccagggactgctatctttaacactgttgtacatcatgagtacactgccttagggttgtctgtgcctccatcccactgactcaggctcactttaagaggaaggattttgctgtaactgtcttgatacatccagtgtgcacctgacacatggaagacattgggtaaatagctgctgaattaattcattcagcaactatttatcaaattcctactttgtgccaggtacttgctctggtgtcaccgcaggaaacaaaacacacaaattcttgccttcagagatcctaatttccactcaaaggagtcaaaggatacacagaaaataataaataaattgtagggtatattataggttatatgagaagataacaaatattatacagaataataaagcaggaaaagagaaagaggaacagcagttttaatagaagcttgcatttgagcaaagacttgtaggcatagaggaatttagccaagtggatctggggaaaaagtgtcctaggctcaagacacagtcagtgcaaaggtcctggggtaggggtatgcctgatttatttgaagaacagcaaagaggccacagtggctgtagccatgtgaacagggagcacctgttacaagataaaaatagaactggtaatggtgtcgggtgctgtttgtgtaggaatttgtaggacagagtaagaattttagcagaggagtgacacaacctaatataggctttaaaaggacccattagactattcaattcagtaaaaataaaaagaactcgtaggaaggtttgagtggaagcagttaggaggcaacaatgacaacccaggtgagagaagatggtggcttgcaccaggggaagcaatgggggtggtgaaaagtagtcaggctctggatatattctgaatagtcttttctaacagattaggtgtgttgtgagaaagaaggagaagttgtgaagagtcaagggtaactccaagatttttggcctgaggaacagagagaggacttactattggtcaaggtgaaaagaacagaggtggatctggttttggaagagatcacaaggccatgtttggaaacgctgagtttgatatttctactagcaagacattgaggagatggtgggatatttgagtctgaaatccatggagaatgtgtgggctagaggcataaatttgaaggaactaataaacttgagcacattactctcttgattttatctcctcaacagtaaattgaggtggcgggagaggatattaggcaagatattcgaataaatgattatctgcaattctttcctgtgctaacatcaggcatttatctgaaagacaattcagcatcccacattgctcacctctggcattctgcctttgctggcctctccgcttgtaattccatttttcaggcttctgtgagacatcactcaaatgagagcccagatgtgacagcagagccagctggtggcaatggatggtgacacagctcttagatacactgggctactggctgtaaagagggcaaagcaggcaaaggaagatacaactgctttatcacgaaacggcagacccagagatagcaacggctgcagagggcaggcatgaggctgccctctttgcaaaagaagccagtgctgtccaccaggcagtgccacaaatggcattgttctttccaacactgagcaggaggctctttgcaggattactttagaagcaggataaatatatgccttgctttgcccaggacagtctgaattggcatcatttattccagtgtaattgttaacagcagcttctttcactttcaaaattatcccagttcgaatgataaattacatgatcgctcatcttataagcttgcctcttcacatctttttcccagaaaagccctagcgtggtctttccctcacgacccagaactttctgacttttgatcagttatgaattgactcaatgtccatgggccaaccctggaaacatagcaaaagctccaaattttcttcttgctgcttccaattcccaacccactgaaaagcgagggacccaggctttgcttcaatggagcgaggatccattgaaggacccagacaatgatttctgcatgtgactctacttaagaatcattggggccactgtcgctttcttggctcctgaacttaccttttctgcatctaagcctcacaagaaccttgtagccaatagtgtaaaatggctcgggtcacctacacagcagggatttgaccacactgcctggttctacattcattcatatcattgcttattaataagctctctttggctgggcatggtggctcatgcctgtaatcccagcactttgggaagcagaagcaggtggatcacctgaggtcaggagttcgagaccagcttggccaacatggtgagccccatctctactaaaaatacaaaaattagccaggcgtgatggtaggcacctgtaatcccagctactcaggaggctgaggcaggagaatcgcttgaacttgggaggcggaggttgcagtgagtcgagatcacaccactgcactccagcctcagcaatagagggagatttcatctcaaaaaaaaaaaaaaaaaaaaaaaaaaagagagaaagaaaatgaaaaaacctctcgttccattcatgcaacaaataccagacgctccctatgtgtagatgccctcaggtccagcacaaaacagagacatcaccatgacttgatgtagaaagtaagaagacaaaaaaaaaaaaaaaggaggtccagctgatcagaaagccatctgatgataaaagtcctcctgaccttcacaccaacattttgtgcattgattattcactccataaacatttgtccagcgtcattaatcgagtgcaggccacttgacatcatttattgtatttaatcctcacggccacactctgaggtcgatattatgatgtcagcttggtagatggaagcccaaggctcaaagaagttagatgacttgctgaaggtcacaaggttgcagcacaagaataggaaccaaggtctgtatgtgtgctttttccagatgccatctccacacaaggcactgccgaaactctcttacccaactctgctaaatgtgagagttcttggaacacacagctgagacctcggggaaggacccacacccatgtgctttctggctgaaggtagaattaggactagggtgaggggggtgaggcactagtctcaggggcaagatttaaggggcacaaaaacctcgataataatgataattaatattttaaagcaacatttttaaaaataatgaattgcaaatttgtaacctttgaccaacagctccccatttcccacaaccccaacaaacttgcagttataagatgaataagttctggaggcctaatatacagcaaggtgactataattagtgataatagattgtgtacttaaaacttgctaagagagtagatcttaaatattctcaccacaaaaataaaaaaacagtaactgtgaggtggaggatatgttaaatgtccttgagaatggtaatcatttcactgtatatatgtatatcaaaatatcacattatacaccttgaatatatatcattttaatttgtcaattatacctcaataaagctagaaataaaattttaaaaattggaaaactacagcccttggcccagctgcctgtgtttgtaaataaggctttattacatttcacatgccaaggcaagtcacctccactggccccaggtacttggtttcacttgcagaataaaggctttctgtgccgttttcacttggagggcagggcgcttgtctgtaaataaaggccacgtgcaaataaaggtcctggacaatcacaaagagtgacacgaggaggcagactgctctccaattcctccccagggctagagtaaccctgaggcgatttttagacgtgaacaggagacaggcagccagggtgcagataaccggagaagaggaacccagaggtaggaggacagcgcaaggtggctcaagtcccgatcccagagagatgagttcagccattggtatgaacatggagggatgcagtgccatttcttcactcagaaatatgatgtgtgctgtcactatttttaacgcaaataccctcagcgacctgggctccaccatccacacgcggtgactccagctctggtgcaaagcaattattaatgggaaaagagagtgctggggcccccaatagccatttttaactgtggacattattgctcaattttgagctgcacccggggactcataagaggaagacataatgcttgtttgtggaacttttatagctaattgacattttttcagtgctcccccgacagctgtagttactcctgattggaagggccttgaaaagcatcaagttgtgcaccgtctccagatgggcccatatttctgatgtacaaatgaaaaaaaaaagagtataaataaaaagccgtcaaaataaacacactcaaaagtgataaagaggagctgcagtgattggcaaaaggatttctctttgtgcaaaaataatgagtgctattttcatactaattgaggaggttttactatctggagctgtcagacctcctcctttctcagaaacattttccatccttctacatctgtttttgctctgcagagaaaggggaacagggaagcaaatttccccttcccccgccaatgtgcttcaaacacctggcctcaagtgatcctcctgactcggcttcccaaagtgctgggattataggtgtgagccaccatgctcagcctgaagttttctttcattcaggtcagttcagcaactctgagacaaaatgggctcatttctctccatggtttcagcacaagtcccggaacaggctgttactggcccagctgaggtcacgtgccatccctgaaccaattactgtggctggggtgatgtggcaagcctgggtcaggtaggaggctggcaaggcgtggtctcagccctactgcatcatgagcggagaggtagggtggtgcacctactcaaaggaaaatctggaagctgcttgttacaagaagaaagggcaaaggatgctgggctgggaaaaacaactgacgtacattgcaacataaactctcataagaagagcacacaattttctagaatgcttcaatgcctgagagttttagtgctctagttccctagcaaacagactctgagacgaattaggtgcaggtggattgttgcagatggctcttgggacagcatcagggagaggcagggaagctggattgggcagaggaaggagtagggctgccatgcagttacaacagcagactcaactcaccccacaaggagctctagagctcagacagctcttgcgggttaccctgaactgaaccaaggggccagcccttggtaccttctgcagtgatcagtcattggatgcggtctgcccattggtaagcgtcctaacctttagttaggaggctctcttcagccgagggcaattcttgggagagggactcaactgaggaccatcactagacagcattcctagcacttagggaaaggagtgcctcgtcctgaaggggagatctgggaggagctcctgaatgaagagggtcctagtagggggcagtgtagtgagggagtcaaagtaacattcccaaatgtgaggcttcaaactctatttacctggtaccagcagccagtgcagcctgaacactctgacctcgggagaggaactatgagctagttccatgccagctcctgaatctctcacatgggattctaagagtatcggagggtgagaataaagagtctctggaattaatactctgttgttttttaaaagcctggggaacttaaatgctggttgttggggtttcggttcaagaaaattctattcagatttgggttacagaaactacattaatagccaagaaaagagggacatggacctcacactaaatcagttcaaggacaggaaaaaaagcagttgtttaaatgggaacactcaggggccaacaagagtgtgtttcttaaagtgtgtcaggggaaaatcaattcccaaaaagtggtaggaaattaagagaaagtcttttaaaaaactgtaatcagagaattagtctaaggcttcttattaaagaagtcttctttttaaaggagaatcacacagaaatccagaaaatttggtacaaagaaggtgggggattctgaaacaaagaacaatgagataaatatagtaggacatgaccagttctgcacaaacagcttttcagagggagagatgtgaggaacaaagtcttctcacttttcttccactgctgatcttttcttgcaggagttatgaacctaacgcttgtaactgtgctcaagctgtccacagatgcctgaaatggaatacaaattgtatttgcacaaatacattcttctgaagggagcatctgtaaatttcagctgatccttaaaagcaactatgattccatgaatgtttaagaaccaaattccagtccaaatactgactgtagaggacaaacaattttaatgagaaggagaaaagagttaaaaatacttttatttcctttttgagtagatttctcattttcatgtttcaaaatttaaaatacatagcgtgtccagtgaatagtttctctcccttccctgcccacttctccctggttttcctccacatagcaaataatattatcagtttttgtgtagcttccataatgcattctctacatatttgcatgttatatatacacatacatatatgggcaagcatgttatatatatgcacacacatatatgggcaaatatatacatacaaatatatacatacatccatatatttgcccatatatgatgtgcatatgatgttacatttatgtatgcatgcatgtgtatgtgtgtgtgtatatatatatagttttgttttgttttgttttgttttgagacagagtctcactctgttgcccaggctggagtgtggtggcgtgatctcggctcattgcaacctctgcctcccaagttgaagttattctcatgcctcagcctccctagtagctgggattgcaggcacgtgccactatgcccagccaatttttgtattgttagcagagacggggtttcaccatgttggtcaggctggtctcaaattccagacctcaggtgatccacctgccttggcctcccaaaatgctgggattacaggcatgagccactgagcctggcctatatgtttttacccaaagagcagtgtaccatagaacactatctctgctttctttcttttacttaatatatccctacctgggcattgatggacaggtggcagaatacaccaccccaaaatatgtcactttggcaaaggattattttcgagctaatgacacttgaaaaagagcaaatgcaagaagggcattctgatctccccttttctttctggaaacacgagataaaaactcccatgtgaaagatgccctccctgtaccattagaaaggaaacattctacagtagtaagtcatagccaagagaattctgtacaaacaggccttgttaaaagacttcttatcttccttgagcttccccacgtactttacttttccacaattatctctctttgttcaacctaatataaaagcatttaggttttgccacttccttgggtcttcattttcttatgaaggctcccgtgtcacgtaaaatttatatgcaattgtatactttccttctgtcagtgtcttatgtcaatttaattctcagacccagcttaaaactctacaagagaagaggtaaaattttgctttccctgcaacttaaagatcttccttattatttaaaaaggctcttagtattctattgatggatataccataatttattgaaccagttcctcaatgataaacatcttggttatataaaaatatttcactgcaataaataagcttgatcatgcataaatttgtgtaaaaatatctgtaagataaattcctttaaacagaatctctgggtaaaatggtaaatacatttgtaattttgataggtattgccaaatgactcttcatcgagcttgtactaatttaaattccctacagcaatatataagggtgcctattacctcatacttttgtcaacagtgtattaataaactttttatctctaggataacaagtgataaaagtatctcaataaagttttactcatatttctttcatttttagaaaatagcatctttttatataagtattacccgtatttacttttctgtgagccacatctttgcatactgtttccatttttctatttatttgtaggggacttttatatattaagttaatctttttttatttgagatggtcatcagaatgggcgttaaatagctttcaaaatgtatagaaagaaaaagaagcccaactataaatatgttctaaaaggaatagaaatgtgcaaaaaaaaaaaaaaaaaaaaaaaggcagaaagaattagaagggattaggataagtgggctaaaaaggaagaaagacaaagtattcctgagagttaaacattgaaacctggaagagagatataatgatatcctacagaataggaaacaagagtatatataagttaagataggctaaacagctgtaacaaatatatccaaaaatgcaacaaagcaaatatagtagcaatttatatcttgcccagtaactgtctggggcaggtgactctctcaatgtggagatttaaggacacacatccatcccctagggtctttgttgtgttttgtatccacttgcggaaagaaaagaaagtatggagcaggtacgcccacttcttaaaagcattggccttcaaatgttttgcttcacctacacttctattccattggaaagaagtagtcactattctacacttcactgtgtggggagctgggatagaaagagcctggctgggcagccacttgcaagtgactactctttctgtggaagtggggaacaattttcatggacagctagccatctccaacacaactggcaagagacatagagaaatagattaggtactgaagactcagagaaatgagacatatatagtaagcagaagcccttacctggcttcacagcccaatatctgaatggtcagatgcttgtggcccaccctgctactgggagcaccagcagagctgtctgctgtgttccctattttctcctcagtgtctagaacactggaccatagcaggtactcaataaattacctgttgaataaagttttacaccaagaggaaccaaagctgaggctgaggatggcaaagtgcactgccctgcccaagacttgccctggcattgagggtcacaaggctactcatggactcaggccccaccttgctattccaagtccctctttagtcttggcctgggattttcttgtttgacttggagactttctcagcatttgagctcagtctccatatttccacagaagttcaaattgtttgttatcagtcctcaaactcctaaagacatctctctaaaagtcttggattttagtatgagtaaataataattttgattttgtttattactttccattcctccagtgactcctcccaatttcctgtttgttatcctacccctaatccttaaagaaaaatgtaaggctcaaacagacatgaaattggagaattgtcattcctatcccttcccccaaatactttggtcccattcaatagcatcataaactagggtgagtttatcagcagcaatcaggctaaatccagtccattcataactacttcagcttcatgacctacaattgtaaactcagattcataatatgtgtaacaactcccctaggtgttgtcacagtcctggacatgacagtgtataccaatgccaaggacaccaatggagggtgcctctgtctcatcagatttacctctgaatttttaattttttaatttaaaatgatatggttttacacagaggaagtcatcaaggctgtatggagcaacgcaaaccaagccaagacatagctcgttatagcagaatcaacatagggataatgatgccaaggtttctgcaggagtaggaatgaacagagacatactcttggcttctgccttagctcactgtcatctggatttggggcacataaagctcagggaccactaagcatcagtgctgaccaggtgaatgcagtggggaaaggccaccggaaagtggaagagagcagcagacatttcaaagcatgccctgtgtccagaagagtgttgggtttctggtgtgttattactgtatttgaccaccaatacaaacctgggaggcctctctgcatttcacaggagaggcagctctacaaaatatggatgcaaaacaggtccacaatcctttcttaacatcccttcaagccataggactttaaattgagtttcagatttggaaaatgtaatgtgatccagtgaccctagattatgtgatacctcatcagggcctgagtgaaactccactgtcatctaaaaggactatttctgcagcaaaacataggaatatgctcaatgagagggatacatggagattatttaaaaaccttacatcactcctggtcaggtttttcttcctaatgagattgtatcaaacttggggaaaaaattctgatttccaagcattcttgggcttggaattatgaattaaaattatagaccttattttttcctcttcctatgtcatctcctaccagccttccttatttcattactttctccctctcttcctcccctccatcctgcaatctttccccttttaattactagagtatattctgtgagattataatagattttatgtctaccaacaatcacttccccatccttccccatctcaaacaaagaaatcgaaaacaaaaaaagattccatgaccaaatgatttgaaaaaattaggggataaaagtatatctctactgcaataagtatacaaaacttcagtattatgaaatattttgttaatttcaaaaaaaaaaagagagggacgatatatttttgaccagggacagccatggtggacttttgaagatggtgcccctttcttcaatgacccatggagtaagtttccctgtgtactagggataatcccttttccatgttcagaactccaggcttaattgcatgtattagttttggagaatttagctgagacctcttaggattccttttgcattgctgaaaactgatacttaggtttgtccagaaagatcccatattttaggaaacttttactgctaacattataaatttctttaaaatgtgtgataaagtaggagttcttcattaaggtaaaaactgaatttttccacttttttttttttttacattttatgcattgcaaatgactcagtcatttacaaaaatggtatgtggcatttccaaaagagatttatcaccagattttggggagacaagatgttctaataaggatctcagtcggaaatacagaaaatacagattcatccagggctttgaaataatatgtttaaatcaacaatactgaggctttctgtcaattgtaaggtcctcatttttgggatggcagcattacatgtgagaaacataaacacagacacacacacacacagtctaggaaaacttttcatgaacataagtaaatcatcaagaagtgtgaaaaacaatgtgttcttggcttcctttttaaatacaaaaatggctatagaaataaatattgaaccctccatagaaagaaattccaaaaatataattttcaccatgacctaaatggtggctcaggattcccagatggcaaaagtggaaaccgtcagatctcttaaggcctcccttcagaacttgcacacttcacttctgctgcattttatcagtcaaagaaagtctccaaggaagctgaaatgtctgatgggagaatggaaaatcacacggcttcagggcatgtaggaggagaggaattgttctggacatatttgcaaacaatctactgataagtcgagcttatgaaaattataaaggcttttgacaaatatagtcccttagagaaagggcaccagtgacattcctacaggagtgagtctatctgttccatgcattctctagtggtgtaccagaaatatctttaaactttcatcagttcaaggcattgcaactgatagcccagaagtaacttcattttaatttttacttcctggtaaagttgaacatatattggcctgtccattggccactgaaatttcttttcttgttaactgtatgttcatatcctttgtctttgtaaaaattaaggaatttaaaaaagtaatttagaaacggattgtgtgtcctcttcattaatttgaaagagctctttacacataaggtaattctttatcacatatgttgcaaactttttccagcttgcactttacattgtttctgaagtaaacaccatctgcatcctttcctgtcaacatccctacctcattcaggcccagctaatctagattttcctatgcactcagtcccgcaggcacatccttagtgcaggttcctggatggatcagtcactctgtggtgtatctaaaatgctcgcttatcctgtataatccaccaatccttctgtggagtacatattcaaaagaaaggaaatcggtgtatcaaacagttatctgcactcccatctttactgcaggactattcacaatagccaaaatgtggaatcaacctgagtccatcaacgaatgaacggataaagaaaatatggtataaacgtagcggaatattttccagccataaaatgaatgaaatcctgtcatttgcaacaacctggatggaattggaggccattatgttaagtgaaataagccaagcccagaaagacaaatattgcacgttctcactcacgtgtgggagctaaaaaagtggatctcacaaaggcagagaatagtttggtggttaccagaggttgggaagggaatgggtgaggtgggaaagggaatgaagggggaaaaagaatatacatgcatttattacccctgaactgcgcactttaaattggtaaacatggtaaattatatatacactggtctgtatattttacctcaacaaaataaaataaaatgctagttcaggaagctcactcaggggattggactgggggacttggctcaccatgggctgcgttgctggaattcagtgttctcaccaatcatgttggatacttttatagcttagactggatctgggagaaggagtagcaggcaggcttagggtgtctcagcaggattaacacagcaatctggattcttcatgatccagtggggaaccgagttgagctggttgtcaaggccctgggatgatgctgttcctgttttcattcatgcttgagctgtacctggagaccatcggcttccccctcccaggctcagagcctgcctagcacctcagaggagccttgttcactggcctacagagaagtcatacctcttagaacctttttaggcttggagtggatcgagcagtggcttgaggagtctggaagctctgaattacaaattaggcctctgtgatgcgtttttgatggtgaggctacagtactcagttagtatcaaatgctaacctttgtggattagtgttctccagattgacagaaccaataagagacagacagacaggtggatagacagataaagatatgtgagggggagattcattaggtgagttggctcccacaattatggaaaccaagcaatcccacaacagggccatctgcaagctgaagaccctgggatgcgggtaaaatggctcagtccaagtccaaaagcctcagaaccagggaagccaatggtggaaccctcagttggaggccaaaggcctgagaacctgggggccactggtgcaaatcctgaggtgccaagaccagagagcctggagttctgatgtccaagggcaggagaggagagtgtcccagttgcaggagagggagaaactccttttctctccttttttttgttctttttgggtccccagatgattggatggtgcccacccacaccgaaggcccatctccccaactcagtccactgacacccatgcaactgctctggaaaccctcacagacacagtgctttacccgttctctaggtgttctttaacccagtcaagttgacacttcaatttaagcattacactcagtgttgctgtgaaggcatctttctgatgtaattaaaacttacttgagtcatcagttgatgctacgggaaatcgtcctggaaatttaggtgggcctggttaaagccattggaaggccttaaaaggaagactggtgtgtgtgtgtgtgtgtgtgtgtgtgtgtgtgtgtgtgtgtgtgtgtgagagagagagagagagagagaattctacctatggatgacagctttggggtctatgcatgtggagttctattcatgccccacactcttgccttccttaatgctgcctgatggatactggatcttatatggatatcaaacttgcttagccagcccacaattgcacaagccaattccttgtaaataataaattttatatatatatatatttatcctctgtgggagaaggtcttaggtctctgaaacctcaattggccaggatgcctttgtcagtggtgttcttggggactctgtgggcctggattttgaaatctgtccctgggtggggcagtggagggaaagaatagaaaggagagagggtctgggcccaacctaagcctgcaagccttctgatagactgaaggaaggaggaaagggacaggctgactcacctcagtctttatttgatggtggatcatataggaggcatcaccaagtgtcaggagttgaacttgagcagtgggaagaactggctctaaggcactccagtgcttatcttccctctcccacatctgtttggttgtttgcaaacctaggccatctctcgtcccctacacctctggctcagaatcccctctctgggcctctgccaaaccacatcctcgtctccctccaaaatccgatttcatgccccagtgtgccatgacggtcccccaggttgggaccatctggctgcagtgtgcagtttccagacttcctagaaacccgctgtctctcttcttccatgtcccacagacgtgcacatgcatccagcacatctggagtgtctgggagcctccagttataaatctccactttaccatttgtttgggcctttcactagagcaagaaataacaatgcatttaggagccgggaagcaactctccacctttggggctgggggtaactcttctagtctgttcaagctgaagcaagtcaccaacatcttgactttcccttttcttttacatatagattggccataaatttaggctagcttacagttttagaatgtggtgagctatgaaatcacatttgatgcccgtcccatgaaatcctgttgattctgcctctgcagacacccaccctttctttccatccccaagaagctgccgagctgagattcctgccacctttgccccttacttttctcaccccgttcactgagggccctcaagtctgtttctaagcagcagcctgagggatccatttttataatctgaaatcagatatcatacccacaccccaaaacacacacactccttccccatcccaaagagacacaccccttccccatcccaaagagacacaccccttccccatcccaaagagacacaccccttccccatcccaaacacacacaccccttccccatcccaaacacacacaccccttccccatcccaaacacacacacccctttcccatcccaaacacacacacccattgcccatcctaaacacacacacaccttgccttcgcaaacacacacaccccttccccatcacaaacacacacaccctttccctatcccatgcacacacaccttccacttcccaaacacacacaccccttccccatgccaaacacacacaacccttccccaattctaaacacacacacctcttccccatcccaaacacaaacaccccttccccatcccaaacacacccaccctttcctgcatgccaaacacccacaccccttccccatcccaaacacacaccccatccccaattccaaacacacacaccccttccccatcccaaacacacacaccccttccacatgagaaacacacacaccccttctcatcccaaacacaaacacacccattccccatcacaaacacacgcaccccttccccatcccaaacacacacaccccttccccaattgtaaacacacacaccccttctccaattccaaacacacacaccccttcccatcacaaacacacacacaccttccacatcccaaatacacacaccccttcccatctcaaacacacacatcccttccccaattccaaaaacacacaccccttccccatcccaaacacccccaccccttcccatccccaaacacacacccctttcccatcccaaatacacaaaccccttccctaattccacacacacacaccccttccccatcccaaacacacataccccttcccatcccaaagacacacactcattctgcatcccaaacacacacaccccttcccatcccaaacacacacactacctccgcatcccaaacacatataccccttccccatcccaaacacatacaccccttccccatcgccaacacacacaccccttccccatcccaaacacacacacccctttccatcccaaacacacacccattccccatcccagacacacccacccgttccccatcccagacacacacaacccttccccaattccaaacacacaccccttcccatcccaaacacacacacccatttcccatcccagacacatccaccccttccacaactctgaacacccaccccttccccatcccaaacacacacaccccttccccatcccaaacacacacacccattccccatcccaaacacacacacccattccccatcccaaacacaaccaccccttccccatcccaaacacacacaccccttccccatcccaaacacacacacaccttccccatcccaaacacacccacccttactccatctcaaacatgtacaccccttcccctatcccaaaatacacacatccatccctacacaccctcacccatttccccatcccagaacctatgcaccaactcagtttatttgaacatgccaggcactgaactaagagaaccaaagtagcaggaggaatacggtgttgtcctcccagaacttaccccctgcacgggagtcagccagggaagcagaaggctaccagatagttgctaaacgccatgagatatcccactgagtctggagtgaatctaactccctaggcccaggcttgcctaacttggacccagcagcctcagcttcatcccagccctccctcagcctcaccatgtggcccctgctggccctaatgcaccaggtcaccttcactcctcctgcagtctcatcacggggcccctgctggtcctaacacacccaagtcaccctcacccctccctcagccttaccacgtgtcccctgctggccccagcgcaccaggtcacccctcacctctccctcagcctcaccatgtggcccctgctggccctaatgcaccaggtcaccttcactctcctgcagcctcaccacgtggtccctgatggccccagcatatcaggtcacccctcacctctcccgcagcctcgccacgtggtccctgctggccccaatgcaccaggtcacccctcacccctcccgcagcctcgccacgtggtccctgctggccccaatgcaccaggtcacccctcacctctcccgcagcctcgccacgtggtccctgctggccccaatgcaccaggtcacccctcacccctcccgcagcctcgccacgtggtccctgctggccccaatgcaccaggtcacccctcacccctcccgcagcctcgccacgtggtccctgctggccccaatgcaccaggtcacccctcacccctcccgcagcctcgccacgtggtccctgctggccccaatgcaccaggtcacccctcacccctcccgcagcctcgccacgtggtccctgctggccccagcatatcaggtcacccctcacccctcccgcagcctcgccacgtggcccctgctggccctctcgcacccaggtggccttcaccttccactcctgcctggagagcccctcctctgttactttctggcgaattcctccttgcattctcaggtgaatttcatgttttcgcctataggaagtcttcctagaggcttgcaggactgagacaaaagcctttgaatccctcttcctataagaatcatgctgacctaatctggaccaatgctcttttagccctgaaatggtggaaacattctggacactcatggggaagaggcaggggaaggaagcagggagaggaaaggaggagagaaggaggaagcaggagagagggaagagagtgtggtgttgggtaagtcaccacccctatctacaacatttactgggcacctcctgacgttggaacagtcgccaccatctgtgtgctaaccggctgtgggaggagacagcttcttgaacaaattcgtgtccctatgctagtcaggccctgggttctaagctcacaacatggattttggtggctaaagttttttttttcccccacaggactatgttagctgtctttaaaagaagaaaaaagaaataggcacggtgtggaatactcagtaagtagacaaattttaccgagtaaaattactgagtaactcacagacagtacaactcaccctttccaacatatggttctgtgagttttggcaaacacatacaaaacggtatcctcaccccaaaacatcccctcctgctgtgcctcctagtcaaccccccaccccccgctgcaccccacactgctccgctggcaaccaccgacctgtcttctatcctgtggttttgccttttcgagtttgtcatacgaatggaatcttatagcaattataggaaataatcatcaggaatttattgcttgacccagttctctaatgctttctgtccactttcttttgttgcattttctttgatcatctctgcatcagacaatgacataacatcatcttctttagagaaaatagatgttaggatttccttgacatcacaaattcttactggaaatgccacagcgtgtggatggtgcttccagcctaagggcaggtcctggggcaggtctttgatctccccctgcccccaccactctgcagctgatgtggggatggaagcttcctgggggcctcagtggcatcaccaccaggggtggggggaatcctcaagctggggcagaactccccaaccccacccttctgtgaacggcccgactgctgctttctttcctgtcttcacgggagctctctgggaccttggaaggagtctatgcatgtgagaggcttaagcttaaatgtcttcatgttaaacctacttctgcctttgccttgcccttaggatatcacagaggggctcaggaagcagcaatgccaccaagcttccacagatgctttgcagtgttcacaatgcttcaacactgcagtgcaatgatggcgtatcagccattctcagtccttcctgctcacagaggaggaaaaagggggcacaactcaaacacctagatttggaaggagagacttttgctaatagggtggtggaaaaggaagatgaatctaaatgcttgcacagattttctggattatcagtgttttgctattccctctttaccaagtaggtggtggttatagagattgctgaaaatatgttttactctattcagactgcccctgctgaagaaatcccactgttagctgagttcccctgaattcataggtgtggttttgccttgtctccactgataagccctgtgacagtgcacttctcagatggcaggcagagaccattacagctcctggcaccttcactgcaaacaagataaagctttctttttgatcagatgtactcacaactactggtcatccctcacaaccatgagttgatcgtctgtcattgatactaggacatttaatgaaaacaaatgaagttctttgagcttcctggacagcatccatttcaagaggaagacaaacaccagcccagccattgtgggctggatggaggggtgagaccttaaaacaagcaaatgctcaatgttcatttcacttcctgaggattttattacaatatttagatacattcgagccctggagctagaagccttttctatgccatcagaattatttcttgtgatgtggccagttctcttcccgaacgtttcctaaataattcctccacctccacctcctctcccacccctcttatctaacttttggcataggtgagcagaaaagctcaaatgggaagtcagctcttagattcatggcttggcaagctggcctcacatcagaacagtagtcatgcagaaaaaccagtcagaggatgggaaaaacaagaccaaactatgcctcccatgtctgcttacgggatattagttatcttcaggaaatagttatttacaagttctgaagctcaaaacagtcaggaaaacagctgcttcaggtctctgaaggtcaaagtcacggcccagtgccaggaatgttatagcttatcttgcctttcaggataaacacagagaactaacttacttctcaggtgagtagcacttcagttacttgggtagaagagatgaacctgcccaccttgaacgttgaggccatggggaacagagacgattctaatacggattagtaaaggactgttgacagctgcaagaagagcaaagaaaccactgtgtttcatcagcagcatataactgcgtgtcccaaagccctgacccatagagcttactccccagtggatgctctagaaacatcctcatcttttgcccacagggcctatccacaacctggctctgcctcacatggccatggaactagagcaagtcctcccagatccatttttttagttaccaaagcagctttcctggtcatggagggaagaatagagacgaaactatcatcatagtccaggaatgggtgccctaggatgcttgggctccttttctaaagcagcttttgaacaattcttatctcaggaaactaaacccatggtacagtctgggtgaggcagaagacgcaagtgggaggagggacactgcaccgtgcaggcacccatggccatggctgctgcttcaagagaaaagtgtccagtctcttgggccacctaataaaggtttgggacaaattttgcccttgctgggtaagctcccagagggcagaggccatgcagatgaactcccaggcttgggcgtccctggcccagcaaccagcataggcagtagctcgagaatgcccagtgatgaactgtggtgtggcttggagtgttacagcttccagatgggtctcctggaatcaactgagagctgatgaggattagtcccagtttcaactgaagcaaaagctcagggtgccaattagtaagctcctatctcccagctttaaacccatccttctctcctctgctatgggatgctggggctgggaactgcaagcctgattcttgctttgccagatgctccctagtaggctctgccaagacaggcactcaagggagagcgcagggctggaggagggagaaaggacctgctcctttgtatttgttgtctgttcctgtgagcagcctccagcagcacttcctgcttgcttccttttcctcaggagatcacttcctgttcttgtcagcatcacctcacccacacttcgtcccccaggcagtgcaagtgcctgccaggagcagtagctgggtccaacttgcagctctctcaacatttgccaacaagcttcattgtgccctgaccctcagagatgccagcacaccccttcaggggccgtggtcccagccccacaagacccctccttcagctcagagacaccagcaccagcggctgatgtcccctcctccagggtggcctagtttcagtgctgtgggggcttttcctccatgtttctgcatattaataattccatgctcccccagccctaagggaggcagctgcttcccagttataacctccatgacaatttggagttcttgtattttttccccttttcagttaactgtaattattttaaattctctttaagaaaacaactggtgtgacttctacctcctgcctcacccatgactgatgtactcagtgtttttctctaatccaggcagtggcagggagcctggagttaacagaatgttgagactcaggtcccaattagctctgtcacttgggtaagtcagaacctccttcagatggttttacctttagagatcattttacattagattttgaatggtggccatgggcagagtgcagcctgtgtatgtgacagcctgtgtccagagcctaggtggacactcttattatgcaacctgaatttctttcggtggagcgcgtcttccccatttgcatctataatgtctgtctagcccccgaatggcccctggatccagattgttttcaaggctccttctagctctgacattcttttgtttccagccaggtgcaatgctgtcctgctcatgacctgtgcttttgctgggagcttggagaatgtctcacaaggcagtataagtgatgtaattgctcccagtcacagataaatgcaagaaataactggtcccccgtcccctgtcttggtcactctgagaagtgcagactcccgggaggtataaaacaacatgctaaagttgtgctctttggggtccttaggggctgtagcccattcctcatctgcagtggttattgccttaccagcagatttgctggaacaaatggagacttttcccttgactcgagcgtgcaacaagaggcttggccactggtggaagaacggttgtagttttctgggaaactaatagggctcctgccacctctaaccatcatcaggatccctgcctagctcatcaagattgcaccccgtgtgtaaggaagtggcatgtggagatgatgtggcatcctacttgatgtcaaaaagtagcatcacgtgcagctggaaagccctacagagtccagctcctccttcctcttgcttttaacttcaatagatttgtccctgggcaagagctactcagagagactgcctttgaaggatcttcacttccaccaaaataaacccttgctttagtatacactctgagaaagaaggcctttgaggtggaacagctgtgagcattgtcagcataaaggagaaggtgtgtgggcctggctgtttgggaaacacagaggctgcagtgaagctaggtacccctctccctgcctgagcacgacctgccacccgcatcctgctgcaacttctcctcacctgagatacgtcctcgcccctcagggcctcttgcttgtgtgggaagctgtcactggctgcaaccacggccagtggcaatctgtgccccattggtgaagatgccattgggagggactaggaggaccttttctgcttgcaccaaactgagaagttagttcactaaatgttctagtgaattaacacatgaagcacaattgtccttttgactaacagcactgagttcatacaaactggaccatgctgaaattttttggaggccctaggttaggagtattgttactgaaatgccagggttttggtctaggtcctgttgcttactgcacagaaagccaatcactgagatgagtactgccagggaagaaggctttaattgaatgcttcagcagaggaaatgggagatcagtctcaaatccattttcctgattgactaaaattagggatttatatagcagggaagaaatgtagccatgaaacagaaattagggagaggcaaggaagaggggttgttcaacaggaagcaggtgatcacttgggtagtcatgctgggtgaggggtctacgtctcatggtccagatgtggtgctctggtgaagtccagcttcttgatgccatctgggaggtctgatggttggtttcctgagaaaggaactcagataagacaaatgtaactttctcaagttttaactctgggaggatcattttctgtttattcaaagaaatcatagacatcagttctatgggaccactgggctggtttcagtatcagcctatgagccatgtgctccatagaaactgacctgcttcactgaaccacacacacttagtgtggctgagctttgtgttctattccagcaaaggggttctctgtaaacgcaaggcatggattgagcaacccatttctgatggccccacacagacacatcatattaacattaatttataggccgtcctgttgaatctaaaaacaatcttttcatttatggacggtaccgagatgattatgttgaggcccggaaggtacacagattatctgatgcccaggcatcctgggcttgaggacacaatgcttctgtgcagttgctggtctaagtcataaactgagccccacagctagcacgtagctttgtgacagctgtgtctgcatggggcttttgtcttctattcacaaagcaaggattaggtaggagcccaaagacagggcgggaactttacttgggcctgctggtgctgcagtacgtaagttggacacaccgcagctgggcatctgagggtctgaggagatggtccttctccatggcaagagcctctgaaatctcagagctccaaacgcaccaaaggtcaaagaaaaagagcagaacagccagcccctgcatggcgcaggacagcactctccgctgcgatcttgtccttccgttgttaatatttaattcagaagcttgtttctttctccctattatgtgggactttgaaggctgagtctcagctgtcatatgcccttatctctcctcccccagagatatcctgaaacagtggtagctaatgggaaaacatgattccctttacaaaattctggtcagcaacctttcaggcgcctttaatctggcctgtacctgcctctccaatcccacgctgccctgttgttctcttcatatcatagccaggatgggtgatttctgccattcaaggtcttttctcaatctggggtgatctctctggcactcaattctcatctcttaggtctcagcccaaactttgcttgccagggagactctgagcctcccagactagagcatttccctagcacatgctccccagcatccttgacttttccatcatgacatgtatcacaatttgcagtcatacagttgtgcaattattggtccatgtcttgagtggaatgggagctcccagagggaagacctgtggccatgatgcccacgctgcctaccgctgcgtgtccggcactgggccctgggccacgatatagaagacattcgtgaatgtgtgttcattgactgaatggtggattgcgggtccctgatgaggagccaactcttctctaacaaggagtaagaaggacacagccagcttgctctgcactctctgtgccatgctccttctcaactaggtggccagtggagccacaagaatggccagagttccttcccctctcccactgcaggaggaagagctggggaggcggccatgacatgaatcaacacaggtggcttcaagtagggcaagtgtcctccattccttatgaactttctcaggccaccttcaaatacccttgtcatctcactgtctttgtccctcccaactcccagcccccagcccccaagggttacagagtgagagaggggccatggggatggcaggcagggaagaatggcacacggcgtatgctcacgagatgaggacccaagctggggagcaggcttgaggtgtgcggtagaagatcctggctggcaccggtgtcttctgggcagagctgtacacacgggcaagtcttccgatgcccaactcgtccaagttcttcggataagaagtctgaaagaatactccagttcccaaaccctgaagggaatgctgcactccttgaccagaaatcctttactaaaaacaaactacacataggtgcgctgagagactgttgctctagaaggcactgaaaacccttcataaatgtaaacacggcctttcccattcacttgtaagggataagtagccagtattttaatcactctgcagctgaaggcttgcacccactgtgggtcaactcttcgtattacagtcattgaaatcaaacttcaaacaccacaccaaaaagtcatttgtgatggcaggccaccccactcctttctcatggcttctagcttgtttttaggagaaaagctaacagagtttagaaatcaaccaaagtgcaattttttttaaacccttaattaccacaaactggtatttcttattgttttctgtgattcttttctctggagattgtcccggcagctttgacagagcagttgcagcccaccctccttccttccttctgcaagagtgggaaggaacgctggagtcacaggaatagcaaaccccgaggctgttctccagtgagatgctctcaggcacaactgtaagtgctactggaaagacacaaacacttctgcaaatgttaattgtgcataagaatactggacactttgaggaaaagaattctgctttcaagcagtgatgtttaattatatttttcacattttccccacaggatttaatttctggaggaaggcttccctctttctggtgatatgtcttgatgttaccaaaccatttcctatatttaatcttgtggggctttctgcattttcatttatgcatttcccattttgtacccagtgcacttccccatctttgatgcttagcgaaagatagcttgtgcatctttttgcaaacatatccatttgtctctctctgaatggggaagaatctgccttttcggcaatggagaaggggaaaaccaagtcaatgaacttcaaattcgcagtgtttggagaggtaatccttaggaaaaaacctcattatttcattttcaaatacaagagtatatttcaaatgaggacagtcaaagaaaggatgttttgcatttagtcaattttgcaagagtcacacaggagacagctttctagaaaggcatggggtaaccttgggagatgtgccacagcctagtgcccagagttcccggatggtaagtgcacgcatgtgctatttgcaggtaacaaggatgaactcacatccttcaaccccttcagttcagtcaactgcctttttgctccttctaccattttaaagtttaacagggttctactggatcccaaattatcattctcaaggtaacaccctggtcaacattaacatcacccctctaactcaaaggtaccactacgggatcaatttgaaacaggatgcttcagaaatttgtaataatgggcaacttttgtcaatttggaaataattccctatgtgcaaagttcaaaattgtgtaccacagaatcatttcctatctaatgaactgtcatcagtaaaagcagtctcaacagaaaaaaaaccaaaaaccaaaaaacaaacaaacaaaaaaaaaaccaagaaagtcaatagccaggtcttcttgcatgtgaaaaaggaggaatacacaaggtttaatttgcgagaatgagtctctgtagattaatggtctttaattagttttcccaaaacctaaatcacctgtcatgataagctaagtaaaactaaagcagttaattttgccatctcactgtccttgtcccttccagcccctagttaattttgccatggatttattttgcctaacttttctactccccttcttttatttaacatgaaaaaagaaagacctttctgataaagtcggatctgaatcactcctataggtgtgtgtcagattatggaaggagaagggtctcctgcggcagagacgttcaactgtcaactgatgacacctcaaggcaacattttaatcaaggcaacattttaggcatttataaacgtcagtgtacttgaaaacctaatgctactgtttgaagcatgtcaggcctgaagcgctatgcacattctctttgaggggacaaggcaagcctgtggcaggctcagagtatcagtaaggagccacatccccttagcacgtggctctgcatccctgactgcgcacctgaggaaatggggtcttgtggttttgtgctgcaggagatgtgtccagaaaaaaaaaaatcttgtctttaaaagttgaatacagaacaccaacgtgaccctgcaccacagctgctccccaagggtgcctccacctctgagtctatggcatgttctagccgtgaaagcttttggctgcttctgctcagacttggacacatatgctgtctacagctctgagtagatcagggaccaaattgggcagaactagctctttctgcatagaattgtaaatagaatcggccctggggtgggataccctgtttgtgtatcttcaaatcatcccccattatgagccacagaatcttctagatgtcagtcattggggaagccagcatgacttggttactccctattcatatgccaaaattaatcacgaggttaaatgtgaatctttctaattcagcaatagcaaggtctgagtgggaactgggcggaaggttacaataccagtgatatcaacaaatttggtgcacatatttatcatgcaagcaagacctaggagtgaatgtcaaaactacttaaataaaaaattgtttaagttccttagatttgtccaaccgactgcaaaagtatttatgttcatgacacttcaatttgaattgcctaaagtggtcagcttggcgttactttgttatttgatgacttggaagtaataaaatatccatttgctaattttctttcactcttttaaattagtccaaatcaatggagtttccatttgttatcctaattctgtcatctgtcttatcttcactccagaaaggaattctgttgtttagatgtgacttttcatttgcttttcaactttccctcatgttttattcagaatcagctgcctttaaatcagattggaagtatgtacttcacgtacacatatgagggactgtaatgagtccgaatgacatggtttattcctctgctgtaaccatgagctggaatgaaactcaagagaccatccagtaccacagcttcattttcagatggacagactgaggcctagagaggcaaaacgactcccatgttatgaccggccttggccagagcttgctagtagtactcaaactccaaactcaactataattacttaaggtgaggattagaatagaaggatcttctgatttcagcacttcttacaaacacatgtctatttattcttgccaaaccttctgtgtgattttaacaaaatgcttaccaggagcctagtctccaataccggcctcaaaggccaagagatagattatctggtcagtttgaagagaaaccacttagtttactcagcaaatgagggaccatctttagggcttaagactcctcttaaataaatgacctatggttaattattatctacccagctcttatcccttaatctctagtttgaaattctctggtagtaattgctcctaaacctattcctgtaatcacaactgcagacaaaagcaggtccttctgcagcaaaaatgtcctcattttttttcacactatactatgatatttaattagtgcaatactagttttcctccttatagggataattgcacgtttatgcatatttttcaggttggagaactttgttgtgaaggcattctctagaagatggaatgcaaacatgttctgttaaccattcatttacgacttcaatcattactatcactgcatcttctgcaacacaaatgctgagttatacattatgcatatttccaagaacattagatcaatgtttaaacagactagtatgaatgatcatgttacagacttaaaataagctgagctacagggtagatgccataacttcatttaatattgatagcagctcaatttaaattttgaaaaagcaaatacatttaataaaattggtgtgaattattacatattttgatggaactactgtacagaatgtatacatatataaatctatagatagaattatatacatttgagtatataccacatacatattttttccactcacatttttctctttagtaaaacaaagcagttttactgtacacagaagtgcaatgctacattaagtcctgagtaatttaaggtatcattaataaactgctataaattctagttttccagccaaagatccaatagattctgtaacaaaaaatgtgaataatacttaaaaatatgcatttagctttgcgttcattttgtgcttagcagaaaaagctcaagaatgcacagtagccatttagatttgggagaatgttcttgaatattcaaggttaaataaatatcctaattgtagggatttatagaagttttaagtaatgttgtctacatccaatttgtcaagcatggaagactacagtcatgattggatcaaaaaatcccttttgcagaatatgaaattctgtgtaaacatcagtgtttgggttttatataaaagttctgattcaaatgagggaaaaaaagaaaaaaatacaatgaaataatttaaaatgcttttcttggaatatagccagccacatggaagaaatataaaaaatacgagtatattttggtgaaagaggaaaccagatgaaagtcatttaagggtggtctggtaagccacccactttgggaggtcccaggctggctgggctcagggaacccacgatggcccaaccacatctatcttgccacaggggacgaactttgctgcgcagtgagaaggaagcactgtgggaaaaggccacgttcaaccgcaatggaacggtaacggctgcctgtcagggccacatcagcaggcagagcatcccatccccaaactcaggcactaggtatggaaacgtgaggtggcccgggcccgctgctgcatgtctgtcttcagcaggaggaggcagacccggatcctcgcatgggggagctgccctgcatcggagcccgcttcgacgagaaggcactgctgtggtggttcctccatcacccctggctctaccccgtcccgtggctgctgtagtcaaagactcctttcttgaagaatggtgaaaactcacaaatggtatgtttcgagagagtcagtcccactttgttgatgtggaggggagatgttgcggactggagcatcacgctgaaaaagtccctgaggtatttctgtggaagagacaagagttaagaacatggtcaattgggaggtcaaggcgggtgggatcgcttgagctcaggagtttgagaccagtccaggcaacatggagaaacctcatctctacaaaaaataaagaaattagctggacagggtggtgcactgaggcaggaggatcacttgagcccaggaggtagaggctgcagtgagctgtgatggtgccactgcactcctgcctgggtgataaagcaagaccctgtctcaatcaatcaatcaatcaatcaatcaatcaatcaatcagaatacggtcaaggtactgttggatggtgtcaagaagagaaaaaatttccagaaacaacttcccacccacctggaaagtgctatcattgtcattaaaaccagcacgtgaggaatgccctccactgtcccacctatcatcagaccaaccagagaagacggagtcacaaaatacatatgcacagaagaaatatctttggctcagcactgattctgggcagcactgtctcagatctacagcagacaatgcctaggaaaatgtcaagggtgccaggcacaggggatctgcctctcagccacagtgtcactagttaatctcttatttaaaaaagtcatttcctccccgctcccagttactcattaaatagaaagatgattaaaaaaaaaaaacaaaaaaaaaaggccggccatctgtacaaggttaaatgtgctgcttactggtattttaaaattgcacagtcagtatctgttttgaatccttcttataaaataaagggaaagcaatactgaggacaagagggtcagttccaagtactgatatttacagatctttttgcatgtcctataatcatcaacaaaaaggaatccttactacaattacttgctccagacccctgctgcatgtttgttgcaacattatctgccgtttttggcactgagaaagcaaagcatatgtgagactaggctctgggaactggggataaaatcagatgtgggagctggagggatgtgttcaaggaaaagagggcacacaagaatagttaatatattttaggccaggcaaatctcatctgtaacagaaaatgggctggagggaaggggttagacccaaacctttattattgtctcagtgtgcttaaaaaacccaaacaaccctggcacagtcttaggaattacacataataattctggactctgagtaacaacaaaaaatttgtgaaagcaacatggcctaagcctggagcagtagttcccaacaagaggcagttctgccccatagagtgttcagcagtgtttggtggcagttttgagtgtcacataggggtgcacaggcagtgcacctggtggatgctggccagggatgccaaagcacaggacaaagaattatctggcccaaatgtcgacgatgccacagttgagaagagaaagtagaatttagctacctctatgaattgccaacctgaaatttccttctgaaagaagacattctactcaacgagaatttgttaattctccttcaaaatattaatgaggactactaacaacaacacttgtaaaataacttagtttctaaaaatcttctaacatccaatgttttacacttaatggaagtaaaactggtgcatgataaattgtacttttttttttttttttgagacggagtcttgctctgtctcccaggctgcagtgcagtggcgcgatctcagctcaccacaacctctgtctcctgggttcaagcaattctcctgcctcagcctcctgagtagctgggactacaggcatgtgccaccatgcccagctaatttttttgtatttttagtagagacggggtttcaccatgttggccaggctggtctcaaatgcctgacctcaaatgatccaccccccttggcctcccaaagtattgggattacaggtgtgagccactgcgcccggccagataaactgtacattctttaaatgtataacttcatgagtgctgacccatgtgaaaccaccattaaatcaagataaatatttgcatccccttcaaaagtttcctaaggcacctaactttatgttatccttacacttggcctggaatcacatcttcttctggtattacccatttcctggtaaggaagctattgccaggagaggtgagcaaggctagtaatctagagagaagacttgaaagcaagtattctcaactcaagatgttttttcttgttccatatccctaacttactggtctcatggtaccctctcaagaaacgatcctgaaattgaaattaggtattggtaagaagttatgaaaatcaactgctgaaaagtgaagatcttaatcttagtaattatttttatcagaggggcaaagagagacctgacttccacttttctgcgggaagggaccctgagaatatcaactttaaagggacttgaattgcatcaaacagggtcaccagtatatatcgtagactacactcaaccagccaatgctcgcggtgcaatgcatgtgcacaactgattgttctgggaagatcaagggtgagatgatttggaaaacgggagatgcagagcttgctgacttgtgcatggagccactgctctttcacagtttaatgcatgatagagcaaggctcgctgcacaggcctcatctcaggtagctcctgtgggctccggcttcaggtctcccacaggctgcattaacaggcaggctgatgtttacagcaaagctgacttcaagatgaactctgacagactggaaggcaatttaaatctgggagcagatgttatatcagcatttgtcataattagtacacaaagtagggtccctataaagggccaataaagcctaaagggtataataagaagagaagtaaaagttaaaaatataaatgaaaggaaaagaggaagtatttgagacacctcccttcaagagcaccaccataagaagagaacaatacaactgtcaggtaatgtctttttctttaaataaactcattagtgttgtttgacaaaaactccagatagaatgatctgatttgactaattctaaacattacagaagagttttctcttcgcaaaacaaatttctgcttaaggagaattaggcagctttcgcctcctttacatagcctgcttccttggcgcaaagaaatgatttgattaggaagcgttctttgcagcgacctcaaagtgctctaaagtctgttaagatgaggcatgacctttgttggccatgtccagagccacatgcttcaaatgggctgaacaaattctggcaaatgaaaaaaaaacaagggactggggctacagctggggacacaagacagaactagaattctagaaagttcttaaggtcacagacagtgtctcattcttctctgaagccccctatcatccctggaacactgccaagcttaggaaacgtgctgagaggaaaccttgctgattttaattagttatctttttttgaattaaagtatatgcacagaaaaccacacacaagtgtacagttgaatacagtttcacaaagttaatatatctatgccatcagcatctagatatgaattatacaacacttccagcccccaggcagccctcctcgtactccctcctccggtacaaaccttccctcaagggcaatcgctattctgatttctagcaccagagattcgaattgccagtttttgaacttcatatgagcggaatcatttgggatatactcttttgtgtctggcttccatggcttaatgccgtgtctgtgagatgcggccatgctgtgcgcatagctgtggtctgttgagtaccagcactgtgcagtacttcacatctgaacaaaaccaccgattggctttaacacagggataagcgttggtcaccgctttggtcctttagtctgaactcttcttcactaatgaaatctacttcccaatattactggtgtctgatgagtcaagtttatcactatccttccaataaagaagtttcctgtagagatttacactcaaatctaagcttagccaatgtacttgaactctgctattttatgtacatattatatatatatatatatataaaatatttaaaatatacatacttacctaacaacacacattcatattagtaatttttattgcctgtgctcacaatgttttccacagcatctgtggctgaagggagaaaattaaaatccccctgtcaaagctatcccttgttgttgaccccaaagtcaccgtagccctcccaggatgtgaaaaatcagtccaggtgtcaagctgcatctccccaggtcagcacgctttataaaagagcattgcgaaaactgaaggatattaggagtttaagtgacttatccaggtcagaagggcaaagtgggaaaaagatttgtgaaatccaatatccaatctgtttctgactttcacaggacattttctccattataaaaagaaataaaagcaggcgtatttaaatctctagcacgtcagggaccacagaaggcctgcagctcttgttcacctggtggacagtgacacacctgagtctttgctttgtcaaatgtcctgtgtcagggccactgagaacagcaaaagcacctcctagggttgcacaacattatggccctgacttggatagttggaggaggaaagtcagattaaaccaaatcttctttcaatacgattgcaaaccagaaataagatgggatggcggagccaaagggggcctaggagagggtctgtctgacagtgagtgatcatgggaaagagaagaggccgagagagacagggggccacagagagacagagggggctgtctaggggaggacaagagaaacagggctgggatggaggggaagacaaaagaggtggaaatgaaaaggaaaccaaaccagcacaacaacgttggagacgggtacccatgatttatttgtttaccaagctggcaaaaagaatttaagaataataagaaatatatcagatatctatctaggttatttactttttgtgacttggaccaatactgatgtaggtgttttcttatcaatactttcagaaaatcaaatttagatggctaatctttacggtatatttcagtgctgacatagagtacctcgatttcatgaattgcctttcttctataggttttgggcatattttgttgctcaggggcagtgagcaggggttacaggtaactgggagacatggacccccatgggtctgttccaaagaaagtgtgaccctggcacatgatgtttaaaatctccccaaaacaaacaaacacaaaatcctgtacaggactatgagcttttaaagtggaggccagaagacacgagcagaagaaggggggatgtggtgatatgagagacaccctagactcaggctcctgcctgctacccacagcacccgccatcccctgcttctcagtcaggtcccctctgctgagccacacggtctctcaccgggcaagtctgtctacaccgggcatcttagctgcttgggtcagatgcactgcctttcctaggcctgatggtgctttcgtggggaccagcaggcactggttcttcagagttaaaagttctttacaaacacggggaaggtcctgtttctctgcaaggctcacgctcttctacagggagccaaggcagctcagggaatgcttcggtatctcccttacagtgccttggtgggcactggccattctctgactgccctgtacccatttcccttcccaaacagcagcccaatccccttctgaagaaacacctttcccctctctgggaattggttaactggttgacttaaggcataggacagataagcttttcccatgatattctgggtggacaccttacagccaaagagctaatcaagctactagcgcttggagtctcctggaaccaagggtcctttgggggacacctcttccagattgtgtagctgctgttatggagcattttcaagagtttgagaaattcaggaaagctgggcagtttcaggagagcctttggtctctgtccattcccaaggctaggagcgaatgattccatctgtttactgtggtgacagtcattttctactgtttaccatcaagttaactaacaataatctcacagcgctggcagggggcagacaagggtcaggaatcagaagaaaccttccttgtagaacacaatcaagctcctccagggctagtctatgctaagatggaggtatctgcctatcacgctcttctcttaggaaaaggtcgatcctaggaggctctggagaatcacatttcagataggtcagagtatcccggtggtccatccacagctaggcctgaagctggaaggctcctgccccagaccctgatctacacatagcccaatctttaaatttccaatgccatttcaaaagacaactactaaacactatcaatcttttgaaccaaaacacaggctaatatggtctactggctgtgttaataagttgtgaaaggcaaaatgaactccctacagcaatacagagtaattcagcaagaatttagtccattatattagagctttagcatggcacctcaattagtttatgcatcaggaaaaaaaattgaaaatataatttgctgctacatgctattccatttagacattcttgaaggtcattatattactatgattcatgtgtgacctacaatacaatttcagtctgagctctgcctgaaaggaaacatgctttggagttactggaaaaatgtgggcaaaatctggcctttaggcagcttcttttgggtttttcttttgaactgtaaatcttttgggtgaaatgctggtttgctcacaggaactaaccatggatttcatagtccatcctggcaaaaacctgtgaagtcaacaaggagctgcatggtgtggcttcccccctctcttacacccattcccttttaggtctgtgaccttgaaagaaaggacaattttagaccaggggatggagggaaggaggggtggtgtccaagttcagctaacagtctgagcaagagagcaaggccaaggccagcctgtgcaaggatctgggtgggaaacagcaggatgtgaagcagaatgcagagggccttgaatatggattcagcctgcaggtacttcgtacaaagtttccggttcatgagcttatgtgagcccctaagacacccttaggagagggacaagaatggatgtcctttgtttacagaggaagtaactgagattccaaggggcagtgacttggctaaggtcaacaggtcataagaggctgacaaagtgaccagctcttcaaatgtaggagaaagccattattgcctaatttaatcccgaaggttcaagcccgtaagcctgaaatgtaacatggcctttctttggggctgtccatactatgcacatgcagcctcccagaattttccctgaatttcagtcaactgctgcgcgcgcacgtgtgtgtgtgtgtgtgtgtgtgtgtgcgcagaaaatgcaagcatgagaatttgggccttcagatgcctttgaaagacctaagcctccttatctgctggctctctgccttctattttaattatcagggagataaaattgtgaccattttatgttattaaaaagtttctgttttaatagggctcatgactataactgcagcctactgcttatttcatgtgcaatatatcacctcatccatatcattctaatgatttttccggccatctcattgttgtgaggtcctctttattttacaaaattttaacataaatctataatttaatttaaagttactgaaattactaaaattgaaatgttctttaaaaatataatggaactttatccacctttccatagtgacatattaacagagaaaggagttcagtggcattcctcattctcagaagtcattaaccacggtggcggcttaaagacaagtatcagtctagtaagacttagaggtctcatttaactcgcagtacttggaaaatgcatcatccactgatgggccctgaagatggatcaggcctgaatggagctactcagggatgtttctagacctgaaagagttcaggtcacccctggctatgtatcacgcatcgacccagtgtggtcaatatgatccatccagtcaagtcttcccaattctaaactcccataaattcaagtctaaatacctcttgttggctttttaggaatcctaaagtttggctacactgggtcaaataggctgggttccctttccaacatgctcccaaatgtgctccacactccaaggaaatcaggacagcttggtttgggtaactcatccatccagcgcagtcactgcacacgtgttctccaagaagcagtaagccaggcctgggtattgagctgaatgaaacagacacggtgcctcccctcctcccctcacaggtgcatgctggctggcaccatcctccactgctcagagtctctccttgttcccatgggtgctttgctcccatcatctagatccttctcatcttccaaggactggttcaaggtgtgctgtgtactgactcccttctcttcagacttcattcatgcacccaataagtacttactgaaagctttctacacaccagtgttgggctaggtgctgggcattcttttttttctttttctgtttctttttttttttttttttgagacagagtctcactctgtcactcaggctggagtgcagtggcatgatctcagctcactgcaacctccgcctcccaggttcaagcaatcctcctgcctcggcctcctgagtagctgggactaaaggcatgtgccaccatgcctggctaatttttgtattttttagtagagatggggtttcaccatgctggtcaggctggcctcgaacccctgacctcagctgatatgcccgcctcagcctcccaaagtgctgggattacaggcatgagccatcgcgcctgacggtgctgggcattcaacagctaatactactcagttcttgtgccaagtaacacagtcctgcctgcctgggagacaaataggtaaaggagtaattacaattaaaatatgactatgagagaactgcaatgaggtgacttgggaccccaggggaaaggaaaggctgtatgcctagtcctgggaattggttacttttatgccaagacccatagggtgatgagaatcaagcaggtgaagacattggagaaagatactggaggaagcctgttctgggcagagcaggaagcaggtaccaagcctagcagctgggaggcagggctttggggcatcaccaattgtctagcgtgactagaccaggcccacaggcacagagcattcagcagataggacagactcctgggaacaggactgctcctggacctgggctctgccagtccccatgctgggggccctacacagttgggtggtggcactgtgcgctggtggtggtatctcttctctatggtgaagtcctgccaggccttcaggaagtctcttccagctgccatacacaatcgttggtcaaatgatgcttatgatgccagaggactttcacgagtctccaaatgttaatccccaacttctactgaagtctaccacttgcccgaaggtacttgaaaccaccataaaacgtcattggaacctccagtgtgagactttcattgtgttcattgcagcaagtttggtgtgccgacacttgcataccttttcccagcctctgtcagtctaactcagggcagggcaagctttttctataaaaggatggatggtatactttgggctttgtaggcaaagaggcgaaattaaggatattatgtaggtgtttatgtaataagagagaaaattccggctccaccccatcctgttttcctggggtgggctacccagggtggaaggcgcattttgcacccagtgctgggcaggccactgtcatggtcagtttcacgctctgcctggtggtgccaatcctagtgtgcctccctctttgcacagagcctggcaatctcaactggggcagctgaccagaggcaagacaacttcccagactgagactctactgcttggtgactggcagttgccaacaagtccccagtgtgtaggcggtgaccagcacaggccctggggagcagcgagccgtggctgccagctgagtgccaggaaaacaggcagtgagcccgccaggtctccatggatcacaggtctagcaaattcaggccatgctcacagacagtatgaaaacaggtggcaaggtgggtgtgacctgagggcctatatcagttttctacagctgcacaacaaattaccacaaacgttgtggctggaagcaacacctattcattagctcatggttctgtgggtcagaagtcctgccacagtgcaggtagcctctgcttatggtctcatgggttgaaacgaaggtgttaaaaaggctgggctcctatctggaagccctggggaagaaccacttccaaactccttcaggttgttggccaaatacggcattctgtaatcacaggactggggtcctgcctgaggttcccttgctgactctcagcaaggggctgctctcagttcctaaagaccacctacattcagtggcacccagcctccaccacatttgaagccagccatcagattcccttcacgcttctgcgaaagttgtaagattccaaagacagtaacttgtgtcaaaccctggcaagcggagctggggaaggccatgaagagagggctcgcatgcttgatctgcctgatcacgggaactatcacaagacatgagtcacaccaggacagccactgggacaagaacagctagctaattacacaggaacacctgcctggcacactgttttgcaagccaatctaaaactgtaaggacctaattgtacctccaagattacaggtcctacctggcaactactgatacttgccactcagaacttgccagcccttgcaagctgccaccagcaccataagctttctttcaaaacaacttgcaaacccttctccttccccagtaagcctcaaccttttactttttttcctggacgttgccagaggccaccctggtctgcatgtatgtcccggattgcaatcctctctcttgcatattatcccaaatgaaacaatttttactttcactctctcttttttcacactgacacttcaaatctccgcttcctcttctgttaccaggcagaaaaactctgcttttatggggctcacatgattagattaagcacacagggacactctccctttcgccatgtcgtgtagcacaatcacagttcctcacgagctcaaagaggggaggattacaacggcaccggggggtcattcttagaattctccctactacagaactgtagtttgccaatccctggtctaaactgtaacccagaatataataaaacatatggcagaaaaacaggccacagcacagtagatgccacctggcagagaacacaccaactcaagagggaccacgcatgcacactggctgggaacacccacggtccaggcctgagactcagggtgagcacgcgccctcccacctcccgcactcacacccacaggcttgtgctgtgcccagtacgaagcatcccagagcagcaccatcttctggagctttctgagaggacggaagtgtctgttatctgtgctgtccattatgctagccatgtggctactgagcacttaaaatgtggctggtgagactgagaaactaaatttttaaaattttaccttgattttaccttaatcttcatcttactttaaaattaaatagcaacatgtgactggtggctactgtactggatagcacagttctacactaagattctggagtaaccatgccttcaaatgtgtgagttctgagcatagagtatgcattaatattcctgtttttaaaatttatttttaaaatgtgtaatactttactgactgaaaatgccatacacacagatatttatgagttgaaagggaacttttcattgtttgtacatgcatgtgtacatgtcttcgctacaatgaaaaggattccttccaattcacctgtgttttcccaaatctccagtgcatccaaaaaaatttattgttattagtttttttgcgtatctttctatggcattttaatgcctacataaacaagtacaaatatagacacccagccaggtgcagtggctcacatctctaatcccagcactttgggaggctgaggtaggtggatcacttgagaccaggagtttcagaccagcctgggcaacatgctgaaatcttgtctctacaaaaaatacaaaaatattaaccagatgtggtggtgcacctgtagttccagctacttggaaggctgaggtgggaggatcacctgagtccagtaggttgaggctgcagttgagccatgatcatgccactgcactccagtctgggtgagagtgagaccctgtctcaaaaaaacaaaacaaaacaaacaaaaagcaccaaacccccaaaccccacaaacacagatgcctccatttcaacttacacaagcaggtacataagcaacatactcttctgcacctcactttgttcacttaacaacttacactaaagacctctccagaagtacatagtttctcattctgaaattggttgtactagctcattattaatgaacacgtaggctgttctaatcctttgcagtcctgcaagtaggtaaactatacatggtcgataatttttcactactttagtcgaatgatgtatccccagaacttaacacagtgtctcgtacacagtaggtactcagtcaatatttgttgaatgaaataatgaagaatgaagattattacaaatagcactgtaataaacaatcttatatacaagcaagtgtatcactttacccatagggtaaattcctaaaatggaattgctgggtcgaagggtatgtgccttttaaattttgatagatattgccaaattgttttccgtgggcactgtacaatttatactctctccagcagtgttggagagtagacatccaacatttccgtctgagtactccagagtctgaaaaaatctttgaaaggtaacctagtcctttctcttatcctcataaaatcacaatgttgttgtagctgaggaatcttagctagatcctttgaactacagctgagagaggttggattagaattctagtatccttaaacatcgtcatctttctcctatacttattcatctctctgggcagaatcatatcacaattgagattcctaatgtccagaattcccagaatcatttaaaaataaccttagtctaagagtggaatccatttctgcccaatacaaacttccaactaaccagtacaaggtcaagcagaggtgaagatggtcataaacaggcagctggctgggacagtggtacgtgtgatatttgctgtactggtggccccaatgaaccacatcatgcttcgtgggattcacaccctgtgtggctctcttcgttaaacctaggtggggtttgtgacttgttttagccaatagaatgcactggcactaatgccatgggtgacttgagagccccagctgagcctagtccttagtggagtcatgatcaaaatgcaggcccataagtggcgtgtcttgataccacctggagtatataaaccatccagctgggccctgcccaaattttccagaaccaaataatgataagcaataaaatggtggttgtttttaaggtgccaagttttagggcagttcattatacaatgatagataaccaaaatatatgggtttgggaataaggtaaaatatgagggaataaatgaaattagtcaaagcagaatgaaaaaagtttctttggtttctatttataatttatgactaaacataaattaaagtccaattctacttcatgccaatctctcttccaattcttttaatatttctaatgaataattcttagcaggtatttctttgctatgagctacttttgctatactaagttttaaagtaaatacttgaaatatggcatttatttcttgatgttatagagaagtctgagagctccaagttaaaattcatcagggtgaaaatgttagtctgtgattacagaatcagaactattcattacggctattcagagaatcttctttatgagtttaatgacataagcatattatactgaattattatggtactgcatcaactggattcataaatttaatatactcagtctggttcacatattctaataaaatccagcaagctttaaaacttttataggaaatgtgcatttaaaatccatgtgatattcagtttttacagggtgacgtccttgctcagggtattaagtagtttcagtgatgacgatgacccagcctggcagcaagcttctggggaaacctcacaaatagacaatccatatcagaaaaaccaaaacctgcttttctccagagcacaagtcaaaaccatggggtggaggcgggtggaaagagaagaattgagtttatcttgcacctgtggaccagaagtgaggacatgtaaggaaggaggcaaacagcttccacataatctgacaggtgccactcaacctcacttggttgaagcagaaagtgggaggatgctgggcaaggagcccagttcccagtactcactatggatctttgacctactgatacgtttgaatctacataaatgtttggcaacaagctcaatatagatgccattaggactcaacttcttcagcactggaagaagcctaggagagccctggaggcacactatggctgtttgagctctaatgcagcaccatgagcagggatcctaggcactcagtcttatgcagctaccatgctgggcacaaagacatcaaagcactgtggtttgaagtaagccccttaactcctctgtacctcagtttcctccttgtctgattatagtattttctttttaggattagaagattaaaggagctattgtctacaaaatgcttaggacagggtccaatttagagaaccttagtaagtacagatgtatggtatgtacctcagtaagtacagtatgtactggtgataaggttattgggatcccatcataagtggaagagcatctgtatggtatgtaccttagtaaacacagtatgtactggtgataaggttactgggatcccatcataagtggaagagcatctgtatggtatgtaccttagtaaacacagtatgtactggtgataaggttactgggatcccatcataagtggaagagcatctgtatggtatgtaccttagtaaacacagtatgtactgatgataaggttattgggatcccatcataagtggaagagcatctgtatggtatgtaccttagtaaacacagtatgtactgatgataaggttattgggatcccatcataagtggaacagcatctgtatagtatgtaccttagtaaacacagtatgtactggtgataaggttattgggatcccatcataagtggaagagcatctgtatggtatgtaccttagtaaacacagtacgtactggcgatgggtttattgggatcccatcataagtggaggagtatctgttcttagtaagtacatactgcagagatgctcctccacttatgatgggatcccaataaacccacggccagttgaaaatactctaagtcgaaagtgcatttaatacacctaacctaccaaacatcatggcttagcctagtccaccttaaatgtgctcagaacacttacattagcctacaggtgggcaaaatcatctaacaaaaagtctagttagtgttgaacatcttatgtagtttattgaatactgtgctaaaagtgaaaaacagaatggctgtatgagcagtcaaagtacggtttctactgaatgtgtatcgcttttacaccatcgtaaagttgaaaaatcttaagtagaaccatcatcaagttggggaccacccagagttgatactgtctatataactttgtcctcagggaattgatatgcaaatatgttaattttcccctcttttaaatgtttggaaacacatgggcttaaaatgtggaagtgtttaatgttttctccttcaaaggaaagtaaaagcaagaatttgaaatggcttttttccaaatcacctcatatcagatactggcagaccctttaaaatcacctcatattagatagatactggcagaccctttatttaaagagttgtgttaaggccgggcgcggtggctcacgcctgtaatcccagcactttggtaggccgaggcggacggatcacgaggtcaggagatcaagaccacggtgaaaccccgtctctactaaaaatacaaaaaattagccgggcgcagtggcgggcgcctgtactcccagctactcgggaggctgaggcaggagaatggagtgaacccaggaggcggaggctgcagtgagccgagattgagccactgcactccaacctgggtgacagagccagactccgtctcaaaaacaaacaaagaaaagagttgtgttaaaacaaagaagagtaaacatgtttcaaaatggaaaatcacatttaaaaataaactgaaaatctaacccatgtcaggtaaattgattctaattgattctcccccatatcttgttttaagatacattttagatgctctgattctcaaaagtgccatttggaaaacaaaaaagatgtattattttctttgtttttaagctcatggttccttccttcactgtataaaccttcagagattcctggcatttggagatataatgactgctccaaacgaccaatttgtctgacaaaggctttcaaatgagaatcttgctgtgtggtacctcttggctataatgtacttgaattcaaattcaaagaatcaggacctaaaagactcggccatcgaggagtagttgtacattatttgatggcatcacaaagtctccccttcaggggaactccacaactggatgcatcgagaacactcaatgactctatcgtgtgcctctgcagctgtggctgaacagaatgagctatgcctctaatatgtcacctaaggtagtttgtgtactgagggcaaatctccttcggttaaaattcagctggccttggcgggctgtctgaataatactgagtctctgaattcagggcaagagggtaagcttttgagataccaggagagataacctgctgcctgtgttttgttctctggacgaggggtgcctgatgctcctgtgagactgtttgccttggagattaccctcctgccttgggagctcttcctgagtgtccagaaactgccctgtgtcccttgggggagtcagggtcaagccctaggtgtgatgaggactgtggccccgagtggtgggccctgaccccaccccatgaagaagattagctagggatttgaattatttgcaccaatgatccccttcactggagacaatgactgaggcctgaatatgtcagggaagagggaggtagggagaaaagccagatcaaaacttctcaaatgccaacatctctaactccaaaaaagaatggggtaggtgtctatttcatacagggaaatgcaaattaaaaagttcctttttcaaacagatattacctaccaaattaagaaactaagttttagaaattgggctaggagctaaaaaagaaaaagaaaaagaaaccaaaagtatatacattgaatacatgtacatccagcacagtactttgcttgtaaaatagtcgttgaacaaatgatgcaatgaatagctataggcaatgctgataggcctcgataaacaatgagaagcatgggttttctttccctaggaccttaattcgaaaaatttcataggtttacaatatcttctttcttctgtgtaagggaagtttgttaaattactctagagaagaaagtctatcaaatcttaatttgtgcttcaaagccacactctagaaactcttaaaagtatcctggtcatctcgttacttaaggtctgagaagttgctgtagacaaaaaatgaagaatggtgttgattaggcagctgattaaacatgcgcttccttggacacatgtgtctggctgtgttaaacaccaaatgagcctgaaaactatgtaagcatcagtctttcagtcatcaaaacttttaggacgagtgactttttttagctgcaatgctgcaataggacacaggagttaaaacaaagtactggcaaaacctggatagaaagatgcccctgatcaaagggaaatctcgtcatctaggggatcctgaaggaagctatgtggccatatagtctaaaaaatactgggctaattgagaataagttgacacccagtttctgccacaaggacattgcctttcaaagtaagaaatgtcagtatgtattgactaagctattacttaaatatgcccagattcctccaaataagtaaactgcatataaatacaattttgtgaactggaagataagcactataaggatgaggaaaggtgaacatatactaagtagcataaataccgcacaccctggagatattaagggcagaagcagacttcctgttgctcacagcatttattcagagagctctgaaatacaagccccggggtctactggggctgtgtttccagctagctaaagaaaaatccactgagaaaaaggcaatggcttcattttctacctttttcaactttgattaccaaatgatttcttgattccaacatgagtttaattttacttataaataatatgaagcaggtgatctcaattagaaagcagattaggcaaagtcttacctttttttaaaaaaatgtttttggttgcctggaatgaaaagtatatatgtaaatgtaaatgcattgcaggggattgctggtaacaaaaataagtatatctaaaaatggatggtagctttacatgggcaaacgataaaggtaaaaagttgtgtggaattggaacaaactgatgttctcatccattccccctctaaatactgtctcaaaggattgcaccatatgctgtgattcattaacattatgaaacataactgacacatatagaagaaaaaagtgttgtcaggggaaaaaatagctagctgaattctaaaataaagatgcagtttacacgggcaacaaaagacagcatgaggttcactcgcaaagaccacagtgagcaccttttatctgaaaaaaagcacaaggtatttggaaaacaagtctgaaaaagagggagttaggggaattgatgcatttgcaagaaagcctactgcaaagtgggcaaggcttcatgaaagaggaaggatgattcctgaatgttgatacaaacaatgagcagagaacttagtgggcatgagacagacagtggttcttaaaatacatggatgtgcaagaagaattttaaacacgtcttttaggctgttgcaacaaagggactgaatggagagcaactaaactgacatcaatggaaataaataaaattgactatttcaggaagcaagaagttaggccttcaggttgataacagtactaaaagatgcaaaagtagcaaatgcaatgttaaaacaagcaaagaaagaatcaggtggaccacatagtgcagtgcttctcaaataatatgcagaagggaatcagttgtttgattgacagagatagacgagacagaaagacaaagcaagacaacgacagagatagaaaatacaggagacagaaaaatgaaaggaccagaccacgaggttcaacactgaacaaatggaattccagaaacaacaggaaaaacaacaacaacaaaaccttaagaaaggaaatcattaaggcaatttcccagaaatgaaggatatggcagaaatcgatagaacccatgggtcagaagaatcgacgaactgtttaccagagtagagttctataggttcagaacattgagaacagagagaaggccctataaaggctgctctatgggtttttggtaggggaggaggaagggataggtcacatacaaaagatcaagaatcaaaatggttttgaactgcttagcagcagcactggagttagaagacaatggagaaacccctttgaaattctgaatgaaaatggtttccaactaacattttatatctagccagtgagtgggtacatgaaggcattttcagacatgtttctagaaacttacctctcatacatcctttctcaggaagctactagagaggtgtttcattaaagtgagggagtaaatcaagaaagggaagacatgggtacaggaagcaggcgaaacaattcaagggagagccaaggatgatggagaaggacaattgtggggtggaagggagctgcggtgtggctcagtctgactagaacaggcaagagggttccaggggaggtttctgcaaggaggctgtatttatgaaacacctggtgctctgaatgtttgagaagagaatcatacaattgagcaataatgtgaagttgaattagagatgagtactgtaaactaagcaaacaagctgagctcaccacagtcctgactcagtgcatgggaggaccaggcagggagggcgagtgtccctgaatatatgaggagaggggctgcggggggtgcatgctggggagccatcatccatagtgggacgttaacagcacctaaaattttttaaaaagtcaagaagaaggaatataggaatgcaattttagtttggaagcaaatacaaaaatggaagaaaataccaaaatgaaagagttgctgctggggaaggggaaatggagggcatgaataggggacaggatactgctctccagaaaagcctaatcaaactgtatgagcattgattttaaaaatgtcactaaaattgcatatacacacaaaacagcaataagtgtaaacacatacacacacaaacacatgcacagaaaaacagtcagagaagatacatgcccaaccaccccatgagagcagttacctcctagcactcagcttggtttgagatcctctgaaagcagagcctgaggcagtattgaggagtaatggtgatgctggaagcagaagcatgggggtaggaaagtgagtgagagaaaaagagaaaagccaacaaaggggtgttgctgagcaggtccccactgtgggtgactcagtcctgctggggaccctttgagagacacagagcacgtgcttctgaatcgttcccatgcaggacgggaggcaggcccacttatccacagactttcatcctctcttgtttgagaatgatctccagggccttgcctgctcccagcctttgggactgcctgggtcagggtccatgggggctgccttggcttcagaaaagggtgagggagaaaagctaacagacctggtggggtgcagacacccacaccggaaaagcccaccatggctatggctaatatcacaggtagggcaacagcacagcgtatgtcagcctgtgggatggaactggggctgttggtgagtaagggggactccagctttagccataaatgggcacccttcacgcccatttatcatgagggtgcctctgttagccaccctcatgagctaggacaacgcagggagccatcttttgctcctggcctcagctgctttgtttccacctggttgttaccactttgtccttagcgtccaattttctgatgaggactttttgattcacagcaagcttgctcattattttccaaaggataaacaagcagttttaggaaattaaaatgcaagtttaactgcagccttgggaggtaagaacccaggtaaacatgactaatacaccaaacctaagcaaatccattatcaaaaagattccaaagcatctagagaagataaagagcagcccataagctcccagcttgcccagggtcatagtgcatatcccccgggccagaccatggtgtctccatggggagcaggccacggtggctgctggcctgaggtctgtggagctctgggctatgctgcaatccttccaggaacttcttttatgtttttacaacagtgaattaatattgtattctactgcataacaattctatctagataaatctatatactatatacaatattgaattatatctataattgatatctatacacatctataatctatatagctataatccatattagtataactatatgactatttaaagttatacttataattatatataatctactgacacttaaatctatatatttatataattatatcttattatactatgttttatattatttcataattaataatatatcattatacatctcttctcccaagaaacattaggcagatattggctgtatttaaaataattcaattaagcggctctaaatgacaatccggtcacctgatggtggcaggaagggactatgaaccttactcatgggccatccatttatttacacacaggacgaggagtgtactgaagaagaggagaaaaagcaggttctggcagaaatgagcagctacagctgaataatcaatacaccatcggtgaaaagtaatgatactatggtacatatgattcaaaatggtcacgaatttcaaaactattttcataactcaggcatcactggaaggtagtcaatgttttttctaccaccagtcagagcatcttgagtacggctattcttttcccccatttttagctgtatttctatctgacgcttctcccaggggcccaagagctaattaagagcttcagtttcaaagacctttccttctcacccctgttgtgccacagcatctatgtgaactgtaaagggcagcaaaatgagaaaatattaaaagggtatttaattaagcaaagtaaacagtgaggtcaatagcaactggaagctaacatctgtcttcgaacaaggcaggcaagccaccttcaggtacaggcaacagaggagtgagtttatgcaggatgctccttttgtctacgccacttgtgatatctacttctgcttcagaggcgatgagacatttaataaaagaaaacaaatagtgatgccttgctttatctaggtggagaggagaaacaaccctccagctgtttagcactgtgatgttcaggcttcattttgcttttaaaattaacccaggaaaatgaaaaacgttctacactgaactccaaataaacagcatacacagctctaagtctgccatcttgagtcgttctgtgctactttcttctgatgctatttccatagacaggaaagagttggagaatccctgttatgtatttgccaagcctcaaacaccttgtaaatgagcgtgggagctggggagatgacagatgttaccagtctaatggggctgcacatgaggtgggattgtaattgggattgatattagaatatctaaagctcaacaaatggaaaaattaccaacacagccgtatctggggtgaataaaaatggcttccgtgatggtcaattttatgtgttagattggctgggccatggtgtcactagatatttggtcaacattatttgggatgtgtttatgagggtgtttttggatgagattaatgtttgaatcagtagaacgagtaaagcagattgctttcctactgtgagtgggggcctcatccaatcaggtgaaggcctgaacagaacaaactccagagagtaagagggaattaaatcctgtcttaccgcctgaagctggaacttcagtcttttcctgcctttggactcaaactgaaccatcagttcttcttgggacttgagcctgctggctttcagcctggaacttacacggtcatctctcctggttctggggccttcccactcagattgaaactacaccatcggctttcctgggtctccagcttgccaaatgcagatcttgagacttctcagcctccaaaatcacatgatcacatgaatcaggtctctccccatcattgcttattgcttgctggttctgtttctcaggagaactctaacagagcttccaaaccacaatttgtgaagtggtaaaaaaagcactacttcaataccatgggttatgtgtggaagtgtaaaactcacaaatatatttaacactatatttcactgtctaagttaagattaatgtccaggccaggcatggtggctcacgcctgtaatcccagcacttggggaggctgaggcgggcacatcacgaggtcaggagatcaagaccattctggctggctaacacggtgaaaccctatctctactaaaaatgcaaaaaattagctgggcgtggtggcgggcacctgtagtcccagcttcttgggaggctgaggcaggagaatggcgtgaacccaggaggcggagcttgcagtgagcctagatcgcactgttgcactccagcctgggcgacagagtgagactccatctcagaaaaaaaaaaaaaaaaaaagattaatgtcctgggttttgggtgtccataccaatttcatcactggtccccaggtctcattcagttgaacgacaagccatactgattctatctcatgtgtatgtctctaacctaccagtttttctcatcccagctgccagtgcacctagtttaggccacaatcatgtctccctggaagatgggaataccctagtcactgctcttcctgcccccaggctcccctgctcccaccattctctccacagtgataaagcctcattcctccacttcactgctgacaacattccattggctcctggtcctctggatcaggtccaaagtcatggagatggcttgtggaatctggcttttccttccttgtctaccctcaaccaccaatctcacctttccacagtagatccagattcctgagtcccaccctagtcctggtgaatcagaatatactggaacaaggctgcagaatctgtatttttcaaaaagctgctcaagataatttcaaagattaggccagataggtttgagaaccacagctttgggactcacatcctctgaccttaacaaaagaagtccatgactatccctgcagttatgacagtctcctgtaatgatgtgtctctgctccattagaattgtgagctccttgaagacgcaagctatacgactgactgcatgcaaaacttgttattggtttattcagggattcaaattcttcctggcttagacttggaaggatgtatgtgtccaggaatttatctatttcttctaggttttctagtttatttgtgtagaggtgtttatagtattctctgatggtagtttgtatttatgtgggatcagtggtgatatcccctatatcaggttcagtgcagtcatgggaagcagtcctgagcatgaacggtgactgtcacagtcactgaatggctttaataaagacagcaaagaccctaaaagaaagaccatcagacatcaagtgcttcctgtacaatgcaattagaagtatagtcccacctataaagtgttcttgcaaaaaaaaatcaaacctgaacttaatcaagcctctggttttcagaagatgcagggttagaggagcacggtgaacaatgccacggagttgcactcagcgaaacccagaacatgaggaattcaacaggtaaatgacatgctgtcctcatcaaataaatggtgagtaataaaaaaaaaaaaagagagaaaaacctacagattgtaagaaaccagaaagacgtatcaaccaatgctatgtgtaaatatgttggtcatgattgaaacatacatgttgtaagacagaaaactggtatggcttcaacactgactgaatatttgtttatgttgagagatgaatttggagcgtgtgtgtctgtatttgatgatagtattgtggttacatttaaaaattaaagtcttgctttcttaagagatatagcttaaaatatttatagatgaaataatatgatgcctgatatttgctttaaaataatcccatgtgtgcgtgtgtgtgtgtatgtgtgtgtgcatataaataagattggccccatgatgactgtatgttgaagtggggtgatggagagggtacattggggttcattacattattcattctggttttctacatattgtcataaaatgaaaaaagagaaaacacaggccattagtttctacatcacagtatctgagattccctttaatccaatgaggcttggaaagtttgagatggttgtattaccctttgcatggtagaaattggctagtataacagagttggattatttgattttaagaactcatttaacatctgatattaacacatccaacactcttaggtaaaggcaatttgctcttttgaaccagaaagggttgcaaagaattgccacagaaggtcactctgtaccaaagagaactttggctatgtccttaaatgaagacattcacatttccatgaaaaattctaatcacattttggtattaaattaatgtcctcaagtacttctggctctgcacacaaactaaatagaagattctgtcaacttttctgtctgacagaactaaggagaatttagtttcagtactgtagaaagttaagagggggaggcaggaacaacctttattagatttcttaagtgacccttgaataaaaaacttttacaatttatactaacagttaaatctaataataggtcacttagaatatcgcaaataatactacaagatagaagaacatgaagaccctcaaccaaacaccggtgtgaaaaagtctttgctgtagtatatgaaaattataggggaaaaggatctttacaactgtttgtccaattacatcagtgttccatgcggcctctcacctacttaatggttacatgtgattacgacatatttccttcttggcttctgtgttcaaacattttaacacggaaagggaatcccactaggtctaattttcagacttgggaaggcaatgattgattcatatagacagacgttgaacttgagtttgggaagaacaagtgaataaatatggtgcttgataaaagatacaacagtgactctcaaattttagagtaatgagtgagccacttctaataaaatataaattatcatatgctaagcagtggaaaatacatatgaaaaacataacttgtttggaagatgtgttccttttaataacaatttaaattatactctcaagaaaaaatgattaatagtgtcaaatctacccatctgtccatccacccagccactgttcttctcttccctcttcttctttttctttcttttttatttttatttttttaagcaaagcactaagggcacagtggaaaaataagaggttggaggaaggatagaagtgaaagagcaattaagagagaaaaggaggaaaggactattataaatacataactaccacatgatgatttatttttgaacatgtaccttttaaaaaatagattttacttcttagttttagaggttgttagaaaaactgagtgtagtatacaaatttcccatagaacactttaccccccaaatatgcagagcctcccccgctatcaaaatcccacaccagagtggcatatttgttaggactgatgaatctacattggggtatcattatcacccaaagtctataacttacattagggttcactcttgttgtactttctatggggtttgaaaaatgtataatggcatgtatctaccattatatatcatacagagtagctttactgccttaaaaatcctttattctctgcctattcatctctcccctccctcaaatccctggcaaccactgatccttttattgtcttattagttgtgccttttccaaaatgccatatagttagaatcatacaccatataatcttttcaaattgtcttcttctacttagtaatatgcattcaatgttctgccaaaatctcttcatggcttgaaagctcgtttctttttagtgctacataacattctattgtttggatgtaccacagtttatttatccatttacctaccaaaggatatctaagttatatccacactttggcaattatgattaacactactataaacatttatgtgcagatctttgagagggcacgtttcaacttctttgggtcaatgccaaggagtgagagggctggatcatacggttaagagtatgtttaattttgtaagaaatcgccaaaactgtgcaaagtggctatactatttttcattctcaccagcaatgaatgacagttcttattgtacaacctcaccagcatttggtgctgtttatgttccagcttttggccattctatcaggcgtatggtggtatcttgttttcatttccaatttcctaatgacatatgttattgagcctcttttcatatgcttatttgccttctgtatatcttctttggtgagatgtctgtccaagtcttttgcccatttttttcttttttttgagacagagtctcactctgttgcccaggctggagtgcagtgatgctatcgtggctcactgcaacctcctgggttcaagcaactctcctgcctcagcctcccaagtagctgggattacaggcatgcaccactacacccggctaatttttgtatttttagtagagatggggtttcaccatgttggccaggctggtctcgaactcctgacctcatgtgatctgcctgcctcggcctctcaaagtgttgggattacaggcgtgagccaccatgcttggcctcttttgcctatttttaatgaggttgtttgtgttcttattgttgagttttaagagttctttgtatacttggaattacacccctttatcagacatgccttttgcaaatattttttctcagtctgtagattcccttctcatcctcctgacggtgtcttttgcagagcagaagttttaaactttagtgaagtctatcttatttattttatgaatcatgtcactggtgttgtatctaaaaagttatttccacatccaaagtcatctaggttttctcctatgtcatctcctaggaattttatagctttgtgttttacttctaggcctataatccagtttagtttttgtgaatggcataaggtctgtgtctagattggtttttttgcatgtggatatccaattgttccatttattgaaaagactatttgttgaaaagactatctttacttcattttattgcctttgctcctttgcaaaagataattaattatatctatttctgggctctctgttctgttccattatctgtctattctttcaccagtacaacgctgtcttgattactgcagctttgtattaagtattggagtttggtagtgtcagtcttcctaatttgatttggagtgagttgaatctatagaccaacttgcaaagaactgacatcctaacagtgttgagtcttcctacccatgaacatggaatacctcttcattagtttgtctttgatttccttcatcagaattttgtagttttactcatatagagcttgtacatattttgttagatttataaacaagtatttagttttgggggatgctaaagtaaatggtattacgttattaatttccaattccatttgtttgttgctggtatatagaatagctattgatgtttatatattaaccttgtattctacaagcttgctacaatcatgtatcaattccaggagtttttttctttgttaattctttcaaattatctacataaacaatcacatcatctgtgaataacacagctttatgtcttactttccaatcagtatatattttttcttgtcttattgcataagctaggatttcaaatgtttacttgtaaaattatactgtaagtcactacaacacagctgcaaagtagcaacagcttaaaaaaacaataatcatttctagtgtttgctatgtatcaggaacctatccaaatattttatatgaattatttcattaaccattacaactatataagatgggtaatattatttccattttatgcgtaataaaactgattcacagagaagtaacttgtccaagattactcagtcattacgtagcagagcagtaattcacaaccagatctaatggttctatagtgtatgcttttaactttattgtatatcaactgaggacatattacagactatattttctattaggtactttttacataccattctcatttgatcccctcaacaatcctgaaaactagttgttcttatccttgttttgcactgagaataatgatgctcagaggggttaaataacttgcccagtggcattttgcaatgtggtagagcaagcactcaaacccatgtttacaaatgtgctctcattttgaatttttttgtatttttttgtcagaacaaatatctgctatttgctgttcaacacggttttaactggacactgaacaaatatttactgaggacatattaacgggcagatactgttctaggtgaatgaagcatctggaatcctgtcttcacaaactcagcctctcataaaacataaaatactttgtaacaaaaccaaccaatcaacaagcaaaaaactttccaacaactgctaaaatgctgtgaccaagaaataacaggggaaatctggtggatggcattagggccaggactgcttctactcggtgggcagggcatgcctctctgaggagaatacatttgagctgagggaagtattccaagccctgagatgttttggccgactaaaaacacgatcagtaaagaaatgaagatcctgatttccagcttagagtttaacctgggagcccaaagatggagaacaacttcggctcatagggtgttttgattccctgagtggttagccatcatctcaatactgaatgtcatttggggaataagaaggagaaaaatggcagagtacaactgtttgatgacatgcagggagtcctcccttttctcccctagacttccatctgagtttagaagttgttattattcttgagaatagttgtcttaattttgctttcctcttacaccaattactgctcatgaaaaccaaagtgagatttttcccacataccctccaattggagactctcgctcattggtgcattcataaagcactaacacatatacataggatttctgttgtataaaatgatttgacaggcaattagcctcaggattgcagcatcttcagcttctctgactccaagagccaccaacatggaaaagcccccacactccagttcagtttccttgaatactccaacagccactaaacataacacctttcaaaaatgctttgctgctgatgatagtggtaatggactaataacagaaaacagctcctgctaatgtaaataaccagataaccagaagaaaaaaaataaaaacctaaatgaggaagaaaacagtttttcctatgaggtatttatttaatctctatgtttgataatggttctattattatatgttttgtaagatcagcagagaatagatgaaaagaacattaaatgtagaactgcctaatatctttccaataggtaaatgactgagaaaactcagaaatcctaggatttttacttcttgatatttactttgaaaccaaaaaggctcaatctataaaaatgtctaaaccaaataattctattattgaaaatttgaggtttgagagtaaaataaaactaaagtagaatgagaaagtgtttttagtcaggaaaaactaggctgtgtgttgcaggcaccataagccagaaaggtgactgctggccgtggagtggtggtggtggtgatatatcaatactgacagccattactaatacctgtatttggcagataagtcatttgaactaccgagactttattttggaaacagttcttcacttagttaacatctcccattagacaggacaatgcctataaactctgggcatccctttactgcgagaaaaataaaagaaaagcagttaggaaccggcctggcattctcacagctaagctgtattgttctcccgtggaccacaaacaatttcaaagaatatcaacgccagacaaggttactctgtgaccatgaaggatcaagcccaaaaactaaaaataaaaaaaaagaccactccataatagtgtcagatcaaagacaaaaacatgaacactgtgatcaaatataatcaaatatttcctcttctgggctaatatagtgctttttatcaaccatactttttattgatatgctatagttgtacatattttggggctatatgtgatgttgatacctgtacaaaatgtgtaatttcagggtaactggaatatccatcaactcatttttctttactttgtgttagaaacattgcaattcatatcttctagctattttgaaatatacaataagtgataattaactataatagccacactgtattatcaaatgctagaacttattccttctaattgtatttttgtacccattaaccaacttctcttcacccaccttcatccccttctcagtctctggtaaccaccattctactctctatccccatgagatacacgttttttgctcccacatatgagtgagaacatgcaatatttgtctttctgttcctggcttattgcacttaacataatgacctccagttccattcatattgctgcaaatcctttttaaggctgaataatattccattgtgtatatataccatattttctttatccattcacccattaatggatgcttaggttgattccatatcttggcttatcaatcatgttttaaacctcactctgttcttcctgctttctggataagaattattaatacactcaatcagagaattgcccccagcatccaatccagaacaaagccctgctttcctgcattcttccccaaattacctaatacaagtccaaattcttaataacttccttttaataccttcttactgagaagcttgcatggttcctgtggttcacatggttcttccttgttgtggtaaatcaataaatctaacatcgctttaaaatacatcccagatgtattcctgggattttttggctgaaactcattgatacttatctatttctttgacaggcagaagtccagggcatacaccaagtcagccggggacttcacagtgggcagtcttgcagtcaatgacctggtagacatgccaagagaactaagtagctgtaaataacactgtgtcaatctggaagataatgatcctatgcctctaatctttatcgttttggacaacagctccaccatgattaaatctttcagaaagtcatttttatttttcagattacaatcttacaggttgaaagacagactggtattacagcaagagttccggtatcttccaggaatcatcaagaataagaatagtgacacgattttagtgtctctgctgtcattgactttgcaagtaaatgtaacaaactgagatactgctattgttacatttcacgattgctggggagtggtgctcttttgccttcccctggctcttaaaacagctctgaaatgcaccataaggctccatcattttccttgtcatcattatcaccatcaccaccaccacaatcatctctatcatctctatcatcacaggaccaacgaacattttcgagtgtttttctttgtaccagattccgtgttgtatatgcaatcacatttaattctcagtacaactctaggaaaatggtattattatcctcattgttcagagaaggaaactgaaacagtgacattaaataattccaaaggagcagaatcagtactcaaaactaggatgatctgctccaaggtccacactcttagctatcacatttctttcgatctatcttaatgctcaagctaaagagatgaaaatggggacagaagaggtagatttcagctgctggctgctccagttttctaggcagttttgaagaaaatttcctaggatggctcagcttcttacttccaaaagtgattgtattattctggaaacttttgtggttttagaggatttcatttttttcattaattatagttactccttgaaatgacagattattaaaatgattagtagaaatatttccaagtagataataatgttctctgaaattaataacccaaaatgcacctttcatcaatgaacaaaaataaaacagaaaactcattaacttggggctaatttgggcagattttctgataattcagtgaaggtgaagcatgtgtgaagtataatgggagattaggaattgaattagacatcaattctgccaacttcaagtattgaagagcacagcagggaagatgtgagacataaacatagcttttgatacatgtaaaaagtgacaggagtcttagagaagtagaggtgaggtttcatgaatgttccaaagcagtgctactcaaagtgtggtccatgtttcagacacttttactgcaatttaactaattttatgtctgttgaatctacatataataaagaaaagaattgtgcttctattttgtatgtcctttttatttatttttttcttgtaattaattgtcattcattgtgccaaagtactggtaagtgatggaattaagtacctggtcctttaccactggcagttcgagaaatagaatattctagaaccatatggttcagcttcagatgtttcaggcccgtggttaagaaatactatataccacatttattagaactcaatttgatatccatttggatatacatatttatatactatgtatgtgtgtatattatacatgtatattttatataatacgtacaatatttaaagccataaaaatgtctttaaagatattctaagcttatatttttcagtaattcacataaaatatccttttttatactttaatgaatttgacatactcttaaatctgcacaagaacaatgtgacatctcataaataaacaaagctgtaagctacagagattcagaaacttttattactcacaaagtgaatatttgaagtcaacaatcacaataaacatctttccttaaacaacgaaaacaagattataaataaaagccatcgttactgccatggttagttaagagatgaggaaaggggcttgtgttattaactagtttcttcagttctagaacactgcttggcacagagtaggtgctcaataattgctgaataactggaatggcatttaagaataaataattagacagtggatcttagttaacactgtagtgataacactgggaggtgacttttttcaacagcaatggcctttctttacaggaagaaccaactccattccaaacttagagtatgctgattaaaagaaggggtttgttctaaaagacaactgagtatgaactgtggctttgccacttactacctttgtgaccctctttctcctccccaagacataggccttcacctgtaagatgaagataatggcagaactcaccaagttggttgtgaggaatgtatgacaggatatcataagcattttccactcatgcttggccttaataaacagcaagcaaatgtgggaaagcaggcactatgtgaagcatatgaaattgctgatactccaccatttctggtctacaacacaatggcagtttctaatggcttgacctaagttacgctatctcactgaaaatacattaagaagcaacttttgctcaaactaacacatcagagactgggtacattcttttcctgttacctccactgctctatctgccaacacatgtctcccaggcagctgtcagggctaccggaaggaatgtctggagcctgggaagcatgtcacatatgaggagtgttgttagcagaagcctctgactgactgagggcagagtctgcccacaacatgcacagttacactgaactggttgagctgggccaggatggcagtgtagggagatctacccacattagaaatcttcaaagattctatagttctttttgaacaaaaatgctgggagcatttgagcatgagatgtaaagcaattattagccagattctgaaaaaactggctccagctacaaactaaagttggctaggtatcagtggagcagatagaagtttggcaatgagatgagcccttatgacccaatttatactcctctacttactatcttaccatcatcacattcttactcttgcctttatgtggtgcagtatgttaaatgttacaatttccagcccctacactatcaccacccaccaccagacacataaccaatgctccttgctccaaggtaaaaaaattaatctccaaaacatctgacgacagtgagaaatttctgttcctatccatcatttctaaaaataaatattttaacagacttaacttttataacttgagagtgccaaaatggtgtttatgtctttaacatgaaaacattttacactttttgctaataaactcaaacacaaggtccaaatcttagaaatatcttaatggaagatcaaaacacaactgaatccctacttaaaacactattttatacagctatatcatggtgaggttcagaaagttgcatttctggatattaataatcagttggataacttcttttaagcagacatcacatttatcagctagtgcagatgtgtcctacttgaatccatatgtgtttatgtatttatatatatgactaggtaaagtttcatataggaatttaaacatacacacttagaggaaaggaaatatctcatttgtctttgtattctatgtaacacctaccactgtctccagcatgtagtaaggaattaaatgaatgtttgttgagttaaatgggaagttcagggaaaataactaagttgattttcatatgaaaatagtcgcagggaattaactcgagaagctcagattaactttctattaaagtgaaggttacttatacttgctccttgaaaagaagataatattctaagatttaacagtcaacattaggtgaaatgcattaaatttcaaaagtaagtgcttatttccataaggtgtggaagctgttctctagaggataatgccacagataaataacagtcacagccaagggaaggaagggttccttgcctaggcagagacattaacataaaactctgctcatcaacagctgatggtttagaagggttcagtgatgaagcagcagatgccaaaaggacaaacacaggttccacctgaaagcattaacaatgaaagagtgccctgaactttgctctaagtcaggaagttggaatggaaaaccaagggtacccagtgctgtgctcacaaatgcatggcacacaaaatgcccaatctgtcatggcacagctgtgcaccatgtgagtttaacaagagccctgagtagccagggatgacaacaatctattttctgttggcatataaaaacaagtttataaaccatcattctccatgtttccattaaaggcaggtctagttaatgaaggcagggaagagttaggtaaagaaaatcatccctagttctactgtaattttttaattttttttgtatgatacaatcaaacctttgagaaaacttggtcaagcagactcaccgcaataatcttttccttgaacacaaattcttcagttgggtatcaggatcatgccattctaggttgaattacttcttcagatgtgtaactctgtagtctaactcaaatgcctctaagcatggctgtatcccgaaactcctcttttctcagagtggttctatattcaatatctcaaaactctaaaatgctcctcatagacaacaacctcccagtcttcaatttctcctttgctcccacttctctccttctgctctcacgggaacctccagcctctagatatttccctaatccttgttcagtggcattaagtgcatgccatgggcagccaattttaactggctgtcaccagcaatgagaatacctactttttatacagcacttcacaatccagaaagggctctctcaggactttccttatttgactttatttccagtaggtcttactattattactcttaaaagaagtagcaaagggctgggcgcagtggctcacgcctgtgatgctagcacattgagagatggaggcgggaggatggcttgaggtcaagagctcgagaccagcttggccaacatggtgaaaccccgtctctactaaaaatataaaaattagctgggcatggtggtgcacgcctgtaatctcagctactcaaaggctgaggcagcagaatcgcttgaatctgaggggtggaggttgcagtgagctgagactgtgccactgaactccagcctgggcaacagagcgagactccgtctcaaacaaaacaaaaacaaaaacaaaaacaaatgaagtagtaaggggaactctgagagtctccctgaaagcttgctaacactaggtcgtcatcagctatttgcacttctgtcccttgtctgcctcaatggttcacaatggcaagagagtggccaagaagcaaggactagccatgatcatgttttcaccattcttaaagaaaacaactggtccctgccttagtgaaaagactcagcctcattagcatctccaaccaaataagcaactatatcccaaaaaagaaatacaaactagataaagcagtcaacaatgtgcattggcagtgaggcagtcagaaaaacaacacttgtgttaaaccagagttctacatgtagttggcttggaagattaagttaaaataagtcaaatgaaacctacccatgactaaaataggtatgtgtctttttgcttccaactctcctgaaaaagcaacaatgatgtaatactataaattttcagttaattaattccaagtttttgcagcaagctttgtactctcatcctgtatcacataccatctgtctatggtgaatatttagttctcactcacatcctgcttcctaacccttagaataaatgcatcttcttaaaaataagaaaaatgttccgctagaccagaggaagataaggacttgtattttaaacaagctgatatcatatcttcataatctactgctgccatctcctgtgttaatgaggcagcatcttcacacttgtgaagaaatttaatagtatttaacagaaacaattcttaccggtcagatggtacattttctacatacacagaggaaaaacagcttaattctgttacctctaagtgacttcgtctctcagcaatcacacgttcatccttatttccaaatagtttctttggaggaaattcaagggcagcaagctgaaatagacattttaaaagacatgcattaatagcatacctgttaattgttgggctattattaatctattatttgaaatctcttccatggggtgaaaagaaagaggctgaaagtttaaagatggtgggtcctgccttgctttatcaccaactgtgtgaccttcaacagataaagcaaccttgggtcacattccccagtggtcaaatgagaagacaggacaatgggaactccatggaagaatgaatctgattctcaacattctgtctcagatgacatatcagactctgtgccaggtggtattttatactttttgttttttaaaacacatgtttgttcttctttcagtcctcccaccctttttttttttttactagaatccaattagttttgtgttgagataagaatttgaaaattcaacctacacactacctgaacattttataaaatcgttttcagactattgctaaggttctctaaatattcagtattgccttttcagttaccaccgtgaatgaagactgcccatgtgaaaagaggacttctctttccatcttttcaccttgtttcctaaaaatgaaggttcagattttgtttagcctgatcttagcatttcatagtatttctcttatgcttttcctcttgaatgtacaaaaattataaacaataagttttactacagattcccaggcaagataggattctataatctgatgagaatccaactagccagtgttgccttggctgaataaatgctaagtagcaataattgctgcagttgcagaattcactatttccttcctttctcaatttgtcaggaccagacaaattgaagccaatgaagcattaccaagaaaaaatgagcatttctcccacaatgtagggcacaatatgtcacaaaattccaattttatgcctatgcaaatcactaagttgatttaaatttatattgccacagtgggagtcaagaattaaagactagcatctgtatatataatacttttaaaacatagtattaaagtataatatacatacagaaaagtgcacatatcacaagggaagaactggatgtattttcaaaatctgcacacactgtgtaaccagcactcgcatcaagaagcagaacactgccagcacccccagagctgcacttgctcccttccaggcactccctctcacccctacaaaagttaacgcaggcctgacactatgacaatagcatcgcttggtttttcctacttttgaacttcatgcaaaagatgtcatacagtatgaactcttttgtgtctacctccttttgttcagcatcatgtttgtgagatccaaccatgttgttatgcgtagcaatagtttgctcattttcactgcagtacagtattccaccatgtgaacattccataatgtatttgttcattatcttgctgttgggctttttgttagtttccagtttgtggttactagaattgtgctgctatgatcactttcctatagatcttctgataaacatatgtacgtatttctgatagtcatactcttacgtgttgcaaatgctgggttatagagtgtgtgtgtgttcagctgtatttgaaactatcaaatggtttccaaaacagttttagtaactgacactcctatcagaagtgactgagagatgtggttgctccagatcttcaccagcacttggtacagtggtcgtccttcttagcaatgctggtgggtcatgtctactgtggttcatatttgcatttctctgatgactgatgttgtcaaacaactcttcacctgctcattgacatctggttagtcatttttaggcagtgtctgttcaactcttttgtccatttttaaattcgttgtctgccttttcctcaagtaagaataattctcccttttcactctcttaaaggtgtctttgatgactttatagcctgtcttaaaagttgattgaagttgggcagatgtttgtctcattccccctagtgttctttctaccaaagcagagaaaccttggagtgggttgaaggtaacaccaagggatgggtttccccatctctgtttctcaccaatgtttagttggctgacatccaactttaaaatcagttcaaggtaaagtgaaagaccatgggcactgaggcaagacagacccagtctgaatcctggcttgaccactaaccagcttactagctacgtttctctgagcccgagtattctctgctgaaataaaaccacagaaaatgaaaccaaactttaaaaggattccgtgaagatttagtgactggattttagctatattaatagctgttagagatctgctaattactgagcaagtggcacgcccacattcccttgtggcctctctgcatccactgggaagccgtagtgacatggcttcaaggagcaaagggttttccggaacctggactcagtggcacaaacacactccccccatgttgcagctcagagaagacaggtacaagaagagctcatcttctggctccctccagcttccatctcctccagtacaaacgtgcctcccgcttcccccgatgctgtggtgctgaaagcttggcaagcatgctttcacagttggttgttttgtcattttcttatgtggctgatgaggtgatgtggtttctgtcaggggaaatttatagtcacactcacatgctcaatcagaagtcgtgcaataaaaggactttaggcagtggaagcggggagggagcaagcattcacatctcctgctagtcaacagtggcgttccctctccagacccagatggaggaagcattctgtgctattaatattcagcctgtgaaataactatgtgtaaattatgtgcaacactgttgttcagattttaggaggaaaaggccaattctaagtgactttcaggcctataatcacaggaccatgatactcaactaactgtctgactttagagttgaagacacccaagcccagagctaagtgacttggaaaggctcagagtcatgggggcaaagtcaggactgactccaggcctctcgggataaagctgtaaggagcgtctgcagtgcatgaaagatactgttgcaaagtctttggggatctagggtaaagatgaaaaagagtgattcctcctaagtgtatgtaaccagaaacatgaacataccactccaaggcagtcatcaacagttccaacaagagttgtcaacgggaccctgctgaggacctgcacccttgcccagggtcagcagagcagtggagaacagcaggaagcaggatggggctggagctccccagaagtccattccaggacatacaaagttagttagcaactatcatcttacccctctccaagtaaaaactaagaataatggtagctatccttacaataaagtacaggtaggatggagaaaaggaacagctgcaaaagttccaatgtggctcatgatagaaatgtgagctaatgggcccaggtcctacaggtggggctggggcatgaacaagccaaagaagaaagccaaggccataatgtaaagtataggaaaaacatgcccccattaatataatgatatttccatcggaaacagcttcaactgcaacgtgagtgaatcccttccctctgatatagtagaaaccacctccatgtctcctctttagagaatcctaacagtgccacttaggccttgctatctataagctcaggttggacaagatgaaattgccagttctgtaagttaaaaactgttgagtatcagcaatttcatctatctaaatcctgcataaaacttcgacacttaagtgactgctagggtcgcttcattttccatcagctgcgttatctgccaagtaaaatatctcatttgatagttgctgatcagcgatacctaagccaatccatttcaaaagaatatttttcttaaggcactcaaaagtaaaacaaaaactagaagtatcttatattttaaaatatactacattaaagtagtgaaagcattgggatagcagggcaggtggcacaggaggccatttggagaacaataatagctaacatagaagatattagagtcacattcctaagtccatcttccaaaaagaaaaaaagagcatcatctttacttggatgggcttcctcagctcaaataaaggagtctctgaaaaatgagggccctgatgctgacctgctgaatgactggaatgaagaaggtggggagcaggggcaggaattaccactccattcgtaaaataataatatagctaaacctcttaccacgggttagatggccagagtacagaagagggctggacttttttttctctccacaagtgcaaagctattgcctcatttatttcaaaatagatcaacaaaagcaattctctgtaggtttcatttctgaagtgtaaatgatttgaactgcctaaatagttttaaaaaatggacaatttaccaagatcaaaagaaacactggtcaggacaaataactgtgcctggaagaccaaagaaaacaaccgaacaccaaaaaatctcttccattttgctgaaagtgctgttttctgaaatgtaacacttccaacaaattaagaatataagaaaggttcagagaagatgtgattctgaattgtctctgacctctctactcatgtcccccacacaccaacatcttttatttgatttctcacgttaaataaaaagtttaaaattaaatcagaaatattatctgaacattttcattccctctcaagtactttatatttacacattttcatttttattgcctcatttttctaacagaacagatattctagttttgattttcatgagaagtactgtcaggaacagtgaatgacaatctgtaggtggagagactcctcttggatttcctctgtagcctctgacaaaggagatacagtgtcctatatttaaagaaattaaagttcctgaagttctatatattcctctcaacaactacattctacagcgtctcaggtaagtatttctgaattacataaaaatgttcaagatacttgggattcagtaatggaagaaaaagaatttctttctttctgtaagatttcattttcgtaaagaacaagcatcatcatttccccttacaacttttttggagagagtctcatgttgaaaagcgtgactgcaccaaaaataatctttctgcaaaaccataaaaattggtgaaaccattctggttaaagatggtggagcaatgactcgatttgttcctctcaccttcttcaaaagcactgctaccaccgcaaacactgtctctgaactgggaaaccgccacagctcaaactgtcggccaggcagcagcatccagaagaccatcacagagagaagagatgacgggagacaagggtggcctgccaccctcaccctcacctgcattctgcctatgctaaatatggggatgagaaaaagatcaggatgcaattccactcaaggaggaaggcgagcaggggctgtgagaggaggagcctggggaagtccctgtctccagagacagaggcaggagacgccagagagcaagcgtttggctttatcgcccacagccagcaactccacagcccccatgaaccagaaaacaagagaagatgtgtctcaaagtgaaggaaaaaattggtgaaaacagtttcaggacaattctaagtggtctgcgcatgccatagctgccctcctcctccccagcttctgcccctccttgctcccacaaagtactggtgttttcccacaacaattagtccacttcccttaaagatgagaaataattagaaggaaccaaaactgaaactatgtgtaaaaagggtgaggtgaggtgacattgaatgaaacataagcaaaaggcagctcaagaggatacaccgtaagtgggatcagccaaagctacccaggaggaattcagagaataaatagtcacgtaggaaccataaaatccatctctaaatagagcccaaagaagtaaataatacacacattgaaagaagagaaaataagggtaataaagaggaagcaaagcgagccagttcttggagaaacggctgattccaggatggggcagggaatacacacgacaagcctgaagcaacctatggcgccagaaagcacaaagtgcttgaaaacaaaaacacaagacgcggtgtctcaaaggaacacagacatcaagtgaaagagctcccagtggccaaagctgagacaatttgaaaaagaaaattaaaaagtattggtggataacccaaaatagaataactgaataaataaataaatgggggattcagattcactttgaaaaataaaataaagtattggtgggtaacccaaaatacaatgacagaattaaataaataaatgggtaactcaactatcaattcagaataattccaaataatttatgtagatgtttcaccctcaagaaagtagcccattatttccccactcctgaaatgtgtgctatgcatagtgacttccttccaaataatacagtgtggaaaggaagaaaaacaagcaactctacagtagagaaacttcagccacgtgatcaagtatcaacagtggtaagacatactgatagtatatatccttgagatgatatgataaaaatggcatttttacctctgcggtctccctcccaaaaatgcataacaagtcttcctcaagagtgtcaaggtcactgaaaacaaggcaagtataagaaactgtcacagtgaagaggggcctatggagacgtaatgactaaatataatggggtgtcctgggtgggatcctggaacagaaaaaggccattaggtaaaaactaagaaaatatcaataaagtatagacattagttaataataatgtaccagtattggctcactagttatgacaaatgtactatactaatggcagatgttaatactaggggaaactgagtatggtatataagaactctgtactatcttcagatttttttctattaatctaaaagtattctaaaataggacttctggtttctgatcctacacacgaggagctgaaaagttactcctgtcctcatgacaagaaaaaagctgaaaaataaatgaagatcaacaactctttttagatccagtggagaagtgagatcacagggcaaactactgccctcagactgcagagacagacaggtggacacagagaatcataactcagcctggcactgaggcctgctgctagagccagtattggtagaaacactatgaacagtaattccagaatctctggaggctcaaatatagactagtgtgattgttaaaatctctgaggggggccagtcttgaggaaggtctccacgcttttgagcgttttacttccaggagccccaccaggttctcactgtgaagttggattctagttttcaaatgatgtgttctcactgtgacattaggggattgagcaggggaaggaaaaagtaaccatttttaaatattcccagagctctctgttctccttcacaaggctcgctcttaagagaaagtgttttaccagaacctaactaccttaggttttgccagagcctaaccgaccagggctaaatgaaacactcaacgcaggctcatgaaaagactgcaaactaccctaggactatagaaggcttcctctcaccataccttaccatcacatcatggggctgctgtgtaacagggattacagctgaaataactgtaagcctcagaccctattttaaaagactccaggaaagcccaaagacaacaatggaagacaaaaacaagggcactacaggaaattttagcctctgacaccacatcgacatcaaccaataaacctagcctatatcttagccagataaacataaaacctcgcactaaaaatcaatctacctcaattccttttacccaatatatagtgtctagctttcaacaaaatattacaaggcaaattaaaaggcaaaaacacagtctaaagctattctaaaatgaaaaaaaaaactttaaaaaaatcagtgcctctgcaccctccttccttccacaaaaaaatgtgagccagcaggacttaagaaagaggtggaagaaacaaaaacacgatgggaatgaaagccccagtagaaggaacaagtgcagaacaagcacaataaaaacagattagcacgcagcacacagagcggagaaaataacaacacaaaataaaatgtgataaaagaaatgtgacccaaaaagtttatatctaaccaaagggtctttcaagtgccacaaatacacattctgaagcagataagaactcagataaaacacatcaaggtgcatctttcaaaaacatactgaatgaccaaaaatatccaaccacaagatagcacaatgtaaagatctcagaatataacttaaaaaatttgggaggtgggagaaaataaagttaattttatctctgttagaagagtcacttagtaatttataaaatggaaacacatcatttgaaaactagtgaccttaacatttcaatttaaaaaataatcttagagtcacatatattttagagacaatatatcatgtggtgaagaaaatttaatttgaagttcagcaatttcttcagttttcattttctttcacttctgttcaagtaaaattaaatgtaatgtttatacttaaaaataccatatctagaataaacacaatgtcgtaaagttatttcactcttttccctattcttcgattttaatttcttttttgtcaatctacatctccatcctcttatctgtgcctattcatttagatacttaaaataatgttcattaaatggtaacattaatcatatttatagaatcattttgggataatctgttcctttttttcttatatttccttgtattatgtaaaatttttataaatgaacatgcatcatttttatagaaacagtaaaaagtgattattctttttacaaatttaatggaagagttaaattaacaccatatgtctttttcttttaataacctaagatttggggcaactggatttcaagtctcagcttagcaaatagctggttgtataatctggagcaatgtataaaaacttctctagttcctagtttcatcatcgtgaaaatgaagaaattgaaccaagatgtttaagtttcatttcagttctgaaattctataactcagatgctgatgattaaaatctccctacacagcgttagaagtaacactttagataccatggagatattttacctattatcttggctatactgcttttgaggaaggtatcttacttcctatgaaatcttcacagtattctcatttgaagtaaggctcagatgtgcagaaggaaaatggggcctgatataataatgaaacatattattttttcaagaggttgtagaacagaaaaaggacagacacaaacagaaatgcagtattcatgagaaaacccttaaaatggcatcttttcctgttatagctattatccttacagcaggagtgggaaatgatgcaaagatatttgagctcttatgggaaaactgtgtattaaagttaaaaatgatgactgaggtcaaataaattggatatttgtgacagatatgataggcctagagaatgctgaaggagagcttaacaacagccctatggcctactttgtctcattatgaaatttggttatgtagagtaaaacacaggaaacaaacaaatgaggattacaatagcatatttcttaggcctaagaaaagcataatggcaagcttgttttgcaattcggtgaataaaatatattcaaaagacaaaagacaaaattcctatggaaccaaaaaagagcccacacagccaaagcaagactaagtcactaaaaaatgaaatcaataatttgaggcctaccgatttccaatgaaatttgtctttcccttcttcagtgcttgtgaagtctaaaaacccaagtaattagctttattttggatgttcaaccaccaagcctctacatttttggttgaaaaatagatctatatgaagaattttcaaaagagtaagctaagacaattagtatttacttaaatcttataagctattttataatataaattattttataattattcgtgaatcccagggttgggaattatgaaagcgttgagtatcatccatctagcaagttagctagctatatgtatatgtatgcatattagaaatatagtcagcattctctctgctgatactgtaatatttcttaatgatctcagagtgaaattttcatctataagttgatttttctctttctgattcccggtgaactgacacagcccaattttcttctaagagttatcaggctcaaatcctgacttcaatgtttattacattataataagataggtcagccagtctgctgccatcaagaagacatgtaatggaaaaatgtaatggaaaagtttcctgtttttgaaagccttttctcttggcaaagttcacattttagttgagccagaccctgtattaagtgcaggtggtcttggaggcaacagacagtataagccattttgataaatggcatcgctattactttggatataaataatggcagccctaaaatatagaaaagaaattaaaatgggtaataaaaagccttgcctatcttttatgatttttaacaactgagcagctaaaactgggttataaatcactgaaaggaaattgagaactaataaagttgtggagtctttactaataaaaggaaaacatttgacttctgttaacacctgataaaagtgtactctgttgtcattcctcatttactagtcattttctttactcctgtgatatttggctatctaacttttacccaatttttaaagattagaagaaaaaatacaacatagcactcgaattggtcaaatctgctataacctgtcttttgcaagtaaacccacctacatggtaactagcagcttttgaaacatctgcaccctaaaggtttgtggctgtaaatttaagccattctagcttttgagaaatgcaaataataaaagctcatcaaaaggctccataattctcacatctgactagatggaagcatttctgactactccaaattaatagcagctcccaaggccttataagaagagctgtcactgagaaatatactcacaaacaaataagcaattctcttccaagtttgatttgttaaaggcataaagcagcaactcttcaggacaacctagctggattatgaagggagtgatgagctacctttagactcctgatagggtaacttaagcccataccacacaatatttatgaacatctcttctgaccctagaccagagtctgcaacatactagaccctcctgaagtatcagctgactgaaggaacagacagaattcattgttggtggtcaatatgaagcagccagtgattaaagtcagaatatatccctaacagaagctgctgtcctgttgtcaccaaaaagctaaaacttagagtcatcctagatataaaatcaaatttggaaacatagttagcactacaccatctttcagttatatttggtataaatattgtaacttttccacatgaagtctcattttccccaaagcccggtgtcagtttcattcaggcatgacccagtgaacgtaaacttgaggacattcatatgtgccacaaacattttttaaagtgaaagatacttcagatctgtgaatattaaatatttcatttttaagaacaaatatgcagatgaagtaactaaagtgtattttccatttcttactacgatttgaattgttgcagagacagacatgacaggaacctgtcattgttatcatccatggagacttgctatgtaacagatttttacagggagcaggctttcttttctttggtctcatctagagaattctgtgaattttcccttttaaagtgaacatggccatggagagggaggttcagacaaagagcatgggaccaggaattaggagacatgaaccttgccccatgtcctaaatcttggtgtgaccttaacaaaactctccataggtatttgattcctcatatctaaaatgaaaactggactattcagtcattaagatccctcagggtgctggcatttcacaatgtgcaaacagttccaagctcattgctgtggaagtttccttgtttattgcagaggaaagagtaataaagtccacatctttggtgatcaaagagacaattaacatttcttctccactgtctaggtttgaatgagtctgtcattaattttgacaagaatatttgtcactggaaatcatcttttagatctggtgctttacactaatgaaaaatcaacccgcagctgaattctatcagacattcaaagaagaaatggtatccatcctattgaaactattccaaaagatagagaaagagggaatccaccctaaagcattctttaaaaccagtatcaccctaataccaaaaccaggaaagaacataacaactaaaaaagaaaactacaggccaatatccctgatgaacatagatgcaaaaatcctcaacaaaatactagctaaccaaatccaacagcgtatcaaaaagataatccaccacgatcaagtgggtttcataccagggatgcagagaaggtttaacatacccaagtcaataaatgtgacacaccacataaacaggattgaaaacaaaaatcccatgatcatctcaagagatgcagaaaagggatttgacaaaatccagcatcgctttatgattaaaaccctcaggaaaatcggcatagaagggacacaccttaagttagtaaaagccatctatgacaaacccacatccaacaatatactgaacagagaaaaggtgaaagcattcccactgagaactggagcaagacaagggggatgcacactttcaccaattctattcagcatagtactagaagtcctagccagagcaatcagacaagagaaagaaagaaagggcatccaaatcagaaacaggaagtcaaactgtcactgttcacgagatataattgtatgcctagaaaaccctgaagactcatccaaaaagctcctagatctgataaatgaattcagtaaagtttcaggatacaaaatgaatgtatacaaatcactagtgctgctatataccaacagcaaccaagcggagaatcaaatcaagaaatcaaccccttttacaatagctgaaaaaaaaaaaaaacttagaaatgtgaataggaagtgaaagacctctacaaggaaaactacaaaacactgctgaaagaaattatagatgacacaaacaaatggaaacacatcccatgctcataaatgggtagaatcaatattgtgaaaatgaccatactgacaaaagcaatctacaaattcaatgcaattcccatcaaaataccatcatcatttttcacagaactagaaaagaaaaaaaaccctaaaattcctatggaaccaaaaaagagcccacatagccaaagcaagactagcaaaaagaacaaatctagaggtgtcactttacccaacttcaaactatactataaggctacagtcaccaaaacagcatgttactggtataaaaataggcacatagaccaacacaacagaatagagaacccagaaataaacccaaatacttacagccaactgatctttgacaaagcaaataaaaacataaagtggggacaggacaccttattcaacaaatggggctgggataattggcaagccacaggtagaagaatgaaactggatcatcagctctcatcctatatgcaaatcaactcaggatgaatcaaagacttaaatagaagacctgaaaccataaaaattctagaagataacattggaagaactcttctggacattggtttaggcaaagccttcatgaccaagaacccaaaagcaaatgcaacaaaaaaaaaaagataaatagatgggacttaattaaactaaaaagcttctgcacagcaaaagaaataatcagcagaataaacagacagcccatagagtgggagaaaatctttgcaaactatgtattcgacaaaggaataatatccagaatctataaggagctcaaagaaatcagcaaaaaaaaaagaaaaagaaaaaaaaacccaaataatcccatcaaaaagtgggctaaggacatgaatagacaattctcaaaagaagatacacaaatggccaacaaacttatgaaaaaatgctcaacatcactaattatcagttaaatgcaaatcaaacccacaatgcgataccaccttactcctgcaaggatggccataatttaaaaaatcaaaaaaataaaagatgttggcatggatgtggtaaaaagggaacacttttacacttgctggtgggaatgtaaactagtacaaccactatagaaaacagtatggagattccttaaagaactaaaagtagatctgccatttgatccagcaagcctactactgggtatcgacccagaggaaaagaagtcattatatgaaaaagacacttgcacacacatgtttatagcagcacaacacttcaaaattgcaaaaacatggaatcagcccaaatgcccatcaaccaagtggataaagaaaatgttatatatatatatataacatatatatgtgtgtatgtgtatgtgtatgcatatatgtgtgtgtatatatatacacacacacatatatatgtatgtatatgtatacatgtacacacacacacacacacacacacacacacacaccatggaatactactcagccataaaaagaaacaagataatggcatttgcagcaacctggatggaattggagaccattatcctaagtgaagtacctcaggaatgaaaaaccaaacatcgtatgttctcactcataagtgggagctaaactatgaggaaacatgatacaatggacttcggggactcaggggaaagggtgggaggggggattagggataatagactacacattgggtacagtttacactgctcaagtgatgggtataccaaaatctcagaaatcgccactaaccactaatgaacttatccatgtaaccaaacacacctgtttcccaaacatttattgaaataaaaaaaaaatcaactaatgctcccaagatagatgcaaaagaggacagccaatgtcttaatcagtggtccagagaacatcctatggaggatttgctcccaattacacactcctgagccccaagtcagatttactgaataagaaattcctagtttggggcctgagtctgcatattttggaaaagcttcccaggtaatttggatgctcattgcgcctccactcatccttgaaagcagtgatttaaatgctagttatctaccagttgaagagaatggtgtgatagaaaccacacagtgaactacctgggcctctgataatgtacaaggtcaggaagctggctgtattctatttttgtctgcatagctgtttgctatttagaaattcaaggaggctgagggcttggtgcaactgaatttatctaaggcttactgggtgctctctgtggctgcagttggtagcattataatttgggtggtgagcagatttgcaatttttatattaaacttgaaatgctagtaataaaactgttataatgcatttgaataatagatggtcaatagttgtccaagacaaatacaaggccaacagccaaattcttttcatttctttctttggtgctgctcagaaaataaagaaggtgagaaatggttcatcagcactaactgaaagtccatctacaaattaaataacctcttgcctagtcgttttcttccctcccactagtatttactgggtacccagagaatgccagatgtgagtgaacaattgctctaacacagcaattttccatttttatggaaggctctcaaaatatttttctctcagctttgtggggagaagggaactccctagggatgtggctgattgaggctgattgtgtttgaaacttggggactctaatgactcactgcgataacttagttatgatgaagacaagcaacatgaactgttccatgtagcttatactctcatgatgcacaggcatcccctagcacttgttttgattgtacattttaatacatgaaatgtctcattttcaaaattcattctcttgcctctaagcgcagcagcacaaactggcttcagaatcatttagccaagaatatcatcaaaagaccctcaatgattgattccagtacttcatctgtttcacagtgagatttacgtccttgaaaagtaaggttcctgacttagtccgttcgggctgctataacaaaataccttagactgggtaatttataaacaacagaaatttactgctcacagttctggaggctgtgaagtccaagatcagggtgtaagcagattcagtacctgctgaggtcttgttctccacagatggccccttctgtgttctcacatggcaggaggtgggggcaagctccctcaggtactaatcccatttatgagggtctcatgacctagtcacctcccaaaggccccatctcttaataccaacaaattgtaggttaaatttcaacacaatttaggaggaacacaaacattcagtccatagcagtgctcattaggctctagcatttgaaaagaaagacaccctgttaaatgcatgaaaataaagtctttttaaaaaaatcagacaggagttggcatctgtgaatctcttggaagcagtaactctcctgatgacctctgaccttccagcctcatgtcatccaactttattaaaataccagaccagtcatccaaaaagctagggggatactagctcttcactactcatgctaatggatgaaaaagagatgtggttttaaaagtttttttctcttcagcttgatgagctatgtttctgttttgctggactcttggattgtgacctggatctataataggtaagcttcatgaacaccagacagaaacagtaactctatctccttctcatagaaacaaaaagagaacacttcatgggggctttgtttctgagaatgtaacttgattgatatttaaaagccttacactgattttaatagagtcaaaaatacatagttttcatacagaaaaagcactacagaaattattcgcatgataaaatttcaaagatctgctctctggaagatgctgcataatacttcatagttgctttcaataacacattgtatctgaggctctcacaatcttctacaaactagctgtggcattatcactttacagacgtgaactggaaaacacaggtttaatttgattaagattccatacaaggtcaatgaaggggaacagaaaatgaatgccagaaggagctattatcttgcataatacatgtcaatagatgaagaggacaacttaattcaaaacaaaagaggaaacccatttgaaatccagaagaaactgctaagattaaagaaaatgaataaataaaaatacaacaacaatttaaaaaaccctgagtaatgcagcacctccagtgaagaactcagcctactcatacagtgaatctgaaaacagaatggcaataatgttcgtatatgattgaagatcacatgcagcaaatctgtccttcttcagtattacaaagtacaaaaaatttaggttttttattcatataatctgtcatcatacaattaaaacaaggactaaattttcctttggtttttgcttttcccctgctctcaaccccaacttcccagaattttatggaacccagtgtcttcttgtctgctcaattcctaagttctgtttgtattaaccttaggttacttctattttattcacagacttatcttatatctaataatcaacaactccttaccgctttaattggctcaccacccaaatgtatataaagtattcctgaggggtcttcagttgacaagcacatcattctccttaaggagacattaaggtaaataattaaccaaatgaatgtgagtgaacagggggattagaaggcttagctgaatgatggttaaggaattcttaaactttctcactagggtgatggctttcaggactctcagtctacctaacttagtgcattctttactgatcttggtttttcagaaagtctttaagaacatttaagcaattatcagatttcttcacaaagaaagtctaacacatgaaccagaagacatataggtatgttcaagaatgtttacagagaagtagtcacaacagcaataattgggaaactacccaaatattcatcaacaggattctggaaacctgataaggtgacatgccaagtttgttatgagacaatgttgctcatgcttatggtaaaaatgacacccctgactccctgcctcaataagttgcatctggacaggcagaaatgacagctgtctggtgggaagccatagctttaggattctctgagtgagatgactggtaactcagcaggctgttgggactctagaaattctgcctatggagttgttataagagacactggctcccttctggcacgggattctaggccagagtggttctcacacatgcccatgtggggctcaactctgtacgttagctatcacctggagaagtgaggcaagaacagctctcagacagccgagtggactgctccagagactgcttggggggcttctccaagcccttgtgccctgctggcaagcagtgattcttgtcctgtgtccttcccagggaaactgacgctgagcatgggctatgggagttgtgagtctgaatgcatagctggacccaggaggacttcctggtgagtgttgcaaatcattcctactgagggttagattaagaagaactttcacattccatgtatatattgttgaataatgtcaatcttttataatgaacatgtaatttattattggggaaaaaagattaccaaaagaaaacaaatctccatcaagagacctgtcacaccaaactgttaaaagtatatcccccaggagaccacggctaaactccagatgaaatgtgaatgggcaggatatcattttagacaaagttccaaaagactataggctaactaaaactaaagtgttaaggtgacagaagagtctatcttggcaagcatattcctaattctgtatattttgaattccagtgtgcttttcgatacttcttagcttgattaaaattttggagccttgtatggctaggtaaatttaatatgtgtcatttaaaaatatactatcatcaaacattttgttacccttgcaattaagagagccagaatagtcttctacttccacagaaataatgagcccaatctggtgaaggagcgaagtaaataaaatatgttcccacttggctataaaatagtcacccatgagaggaaattttcaggatccttttgtatcaaccctttggctttcctgaaagagttaggtctttagcaaatcaagtgatttctaggatgttgtcaggccaaatagtccacttggaggagcagattagcattatttacagagatggtaataatataagcactaatgagggcaataataattgacaaatacgtaataaacattgatctcaagtctcaacaaatacttagcaagtattgactatgtgaagctgagctgcataagagtaaaaagaactttacaggaaaagagacagctgatattcaacttaattttaagctttatcttaaaaatgttaaatggacaatgctgttgtgagtgaaataagatttagatctagaatgacaggctactgtgtttttagaaataattcttttttcccatttttatattattgttggtttagaaacagaaagtagagtgcaatggcctgggactggcttctgctcatcaattgtttgatacaaggcaagttatttacatctcccactcttcagtatctgtctctgtaaaacaaggagggtaacagcccccacacttcccagtgatgtccgagaaccacatgagatgcacagcacagcacctggcccacggtcagcaccttgtaagtgttggagttatggctatggacacaaacaacagcatggcacacctcggggtctgtacctttcaacatgtggtgtttgttttaggagcttactacaaggtttcaaatcaccactctcatagtctgttttccttcaaatacatgaacacacgtgtttgtgggttctcctttatatataacattcttttgtccttatgtgagagtaattataagccacaaaattaaacacaacatggagaaccaatttccattcttagctaacattgagatcctgagcctgtcttcaggaaaagaggcttctgcgagcagaagtcgcctatgaatagaaatggtctgaagactgaaacttagctagaaattgaagcagaaataaaagcactttacttagtgtaaaagaaataaaaaaatttttcttaattattcctgatccaaacaataacttgtatttttaagagaaggttcataatatctttctcctttaaactttaggcttatatccttcatctctcttgatagttctaattgggtgtttaaaagtatcctcaaattaatgtctaaaaagaattctggatttgagctctctagcaccccaaccatccatactcggtatggccattaaaatgaccttttaagtgtataaataaaaccactttgttaccaggcttaatactgtccagtggcttcccatgcactaggaatacagttcaaggctccacatgatagagtcccttcctacctctttgcccacattcctctaccatcctcaccacttttccaggcctttttgttcttggaacaaaccaaacttggttctactgcagggcctttgcacttgctcttcccgtgagttacaatgtacccacctccagattttcacggctggctctttctcagcattcagatctcagcacaaattccactctttcagaaaggtgtgcctggtctgccccacctaaagtagtccactacccagctctcatgccacactatcacaaggcctggttttattcactttacacaagctgaaattgccttatttatttgttcactgtttattctctctacttcatgagaagagggaatgcagctgtcttgttcacaatgtgttcaccatgcagagttgctcaatacagatgagtgaattaatgaatgacaccaacttgattttcttcatttgaaggttttttaaaacatgtttgtaatacaccctttttcctctggaaaatactctcatgtatgtgataatctgtgttcattcattttgcctggtaccaagtaacttcttcgactcactggttcatgtcattcttaaccttgggtatgttttcttctattatatctttaaagattgtttctgttatgttcattctggagttttctttaaaaacacagattagagttgtatattggtgctctgaaaactcttttaaatatctctcagctaatgtatcaactagaatgccaccttgtcaggagcccaaccctgaaacaaccttgtactaaagtgtgcccaacaccttctgccccaccattctttattgctaattttcatataaggcatgtaactcactttaaatggtaactgcaacactgcatgcttactcttaaagtgctagctattattttctccttgtttactgtctgccccatatttaagatatatagaagaagaaatttttgttcttgtctgtcacagtcttactggaatccagaaaaatgtgcctacacagaatgggttgaagtaatcaaataatcaatataaaataaatacatcctggaatgaatgtgtgtgtgtgtatataaagtctgagtgcttttatttcatggaaattgcttttgctaggtattgctttgggaattcagtgagtttaattaaatacgcaaaatccgtccgttattaaaatactgatgtagtaacttaaaaccaagtggttaatgagctgcaaagctcactttaaaaacaagctgctctgtacatttcatatgtacacaatacttcttttaattgtcaatattgatttcagccacgaaaattaaactgcagaaacaaacttaataacttgattttgatgttattactgttacaagaagcctcttgggaacaaattcccacttgaagtttcctaaatttttaataaaagactagagagtgtgacagcttagtaacagaatttcagagatagcttaagatatggtttggatgtgtgttccttccaaatctcatgttgaaatatgatccccaatgttggaggtggggcctagtaggaggtgttggatcttgagggcagattcctcacaaacagcttgatggtatcccatggtaatgagtaccttgagatctgattgtgaaaaagagtctaggaccccctcctttctctcttgctccctgtctccccatgtgacacactgggtccccttcatattccaccatgattggaagcttcctgaggccctcaccagaagtgcttcatgtacagcctgtagaactgtaagtcaaataaacctcttttcttcataaattacccagtctctggtaatcctttatagcaatgcaaacaaactaacacagcttaattctacctgagctcaagattcttctatacaccagggaactattttatttacaaaaagctatttctctttgtattttatatcagattttaaaaagggtggaagccatgagaatgttaaggaaacattatttaatgtgaaccaaattagtgaaccaaatttctaactatattttaaaatgtcataaaaaaccataaaaatagtgctcaaaaccaataattggtgaaagcaggctagttagacaatgactgttgattgatctgcagtcagttcaacacaaaattcccagaaagctggacctagataatgcttcctttagttgaagtaaaatcatcttcatcatcatcattacttggaaaacacacattccttctaggaatactttgcttaaaattacttgagaaacctgtgtttgttcaaaaaggaaaagacgactaatgtattaataccctctggatatttgatctgatgcatgaaatgctttctggtctctagataattctgcattttctatctacctttccctctacgttcaatggcaaaataactgttatgacttgacttctcattaagtataagactaagcatgaatgtagtctttcttttttaaagaaaaaagtgtaaatctatatgaagaagttattttaattttaataggtctcataattgagaagttataaattgattaaaatatgtatttaaaatttaccataaaatttatgagaaggatggagttcacttactgtcattgtaatatcactttcaaaatcttctgttaagaaaatgtttaaattgtgtagaacagaaatggaacaaagaagaaaaaatttaaagttatctttgataaatgggttattgaagtaagacttagtgacactaataagctagtatctgaaagagagagacagagagagagataacattgctaatgcaatcagctcatttactttataaaatgaatgctcttaatcggagataataatttcataacttacctctgcatactttaacttcaatgttttatgcatttctcgaaaacgactgtaacgcctgaatacagtccatgtctcatctaggacagtaatctattaaccaggaaaaccaaaatgaataagcattaagaagcaaaagtcactaaaatttttcaaaagaatttaaaaattaaatttaaaaaaagtgattagcatgtaaaatttctctagaactgaaaacattaatctagctgcataaatacaacttagaaataataaatgtactttacttaaacatgcagctttggctctcagatcttgttacaggcagcttgtctatgtaaagtgaagggcagatggtcatctcttaattggttataaaaagtgtccctttttatagaaacacttttaaagaagaggaggtggaagaggaaaaaaatctcactgcctctcagtcattgttagtataataacacaacagtatattttgctttttttcagagggagaataatcaattcagcctttaataggctagctggagtggaaactctgttgcacatcagctcacatatgaaaggtcacagtgacaagaagaggcaggtagaccacatcagcctttacaatcacacctaaagcacaggccaatgaatctccaattcctttctccacttcccacctttcttctgcgctctagacccacatacccaacttggcacatctttcttcccatgtcacccaggaacctccaattcaatttgtccaaaaccatactcaacatattccctccagtcccagctctggtattctccatttcaaagcattctaccaccacctacccagcaatgccagccagagatgctgaagtcatccctgacctcccttctcttcctatccctgcattcaagcaagtgctaagtcttgctccttttgccttctaaacatttcttagaactttatccttccatcctttgccatcagcaccatttgactttaggcctttgggtctcctgtggactctgcaagagcatctcccaactgtccaccccacatctgccctctccaatctcttttctgcatgactgaaaacagatcttttagaactcaaatctaaccatttgatttgggaggtgaccctccttaaggcgagcttcatgctgctcatagaaaaagacctacatttttaacctgcccacagcagcctgtctgcaggcctctcctgctaggtgtcttcactcctgctgcatccctgaatgcgcatattctctgccacctcagggcctttgcacgggccatgctcctttatgggaacttaacttgcacataagggaaatgctcttctcaagcacaataattcagcctgattctcccgcaggtaaatcatagggccatcagtagaaagtagaaacaagaaagagagaagacacaggtgggcagctttgtaaggaggagtgagtctgagtcccagccattctttcattcgctcacttcccaaaagtggcaaatgagatgatctagggtgtatgaggatgtacatttttaaatttttcatcattctggttctgtactcattttttacaataacttttcaattgtggcaggtttcttatgagtttccttgaaaaagacatttccataagaaaacaaaagtgaatgtatttacagaaaatcattacaaacaagagtggaggtgctctgcagtagtaagcatttaaagctggcaagcacgtcacttgagcttgggaaaccctgctcctggctgtgagctggttggccttcctctctggcttgctcctcctcagcagaccccactgaggcactgagagcaaggccagcacaatcagtgaggatgtgggggcttcctccggcccacagcccaacaatccacagtcttggctggacacaaaccaggtggcaaagacaaaactggagcacaagtgggccctgctgccttccaacagggcatgctgcagcctgtttgcacagaaaagcccaggaagttaatggaaccacttcatgacctgtgagtagtaagatgcaggatgtttcacaggtgagactatactatactgggactcaagattcctcagaaagccacctccaaaagcctaggtttctcacattcctcagactgatgttcctggctctccttccttctcctgaaatgcttccactgcacttcttgggctcatgggcaatcatcagcaaaatcccccaggacctcagcctcttctggaacatccctttcatctttgctgtaactgaaacccggctctcccgtgaggaagcacttccgtggcaatgctctccagccgggactgtcttctccccccacactcttcatcctaccgtgctgggatggcggtcgatactcttgttcttcactccaacttccaaataactgctcctgtatcctctctgaactctctactctgtgagcatagtgctttcagaccctgctgctctaccctcctccttgcaggcagccattcaccctggttgcttccccaattccttgaaggtttagagtctactcactgtcatctgcttcagccctattgatctcctgcatgattcttggtaatttcattaatcacccagatgatccctccaacaccctgacctctaatgtccttttacctctgccctggtttcttcctcactcaacttgaaaaccatgagaaatcctcataagcacaaaacctcaaatctgtcccactcttgaaattctctggacaaaaataactcactactcttgttaaaaccaactgtctgctcactccctgcctgcacctgcccagcagaatggggctgaggaataacacgccaccaaacagactgatctcattttaaagtcacaattgccaccatcaagtggcaattgatgacacccaccaatcatgccacgttttccaattctgtgcactcttccattctcttacaaaatgattactcctctttgtcctcaagtctttaacacctctctccatcctctcagctgacaaccttaagtccttaaaacaaaattccagggaataatgggaagaaattgatgacatcaaaaatttttcaggaattttgttttaatggaaaggacagaagtggagtggcagacggaagggaaaggcaagtcgaaatgggagtttaagatgagagaaataatggtgcgtttaaatgctcatggagtaatatgacagaaaggaggctgtgttggtgcaggagaggagaaaattgttaattgcggtgtctttcagaaatctactcaccattccacccagactactcttaccaaggttagcaatggcttctgtattgctaaatccactggtcaatttttggttttgatcgtactcagtctatgggaaggatctgacgtagctgtctgatagcgttctcctccttcaaacatctttttcatttatttcagcttccactgctacacttttatcttagttttcttttcatctgggatttctcatctccctgacttctaaacatcgagtcctccagggctcaatcttgaacatgttttattttctacctgcactcactgctttggtgacctcatcccatctcacggcataaatttacatgtggatgactccctggatgcctgtacctctctcctgaacccagactcgtatatccgactggctacttgacaagctggcctactcagatgtctaatacgcatctcacacttatcatggctgcacttaccaaaattaatctcattcaaacctgctccctttccccatctcagtaaatgacaatgctattcttctccctgttccatgcaaaaactctggcatcatccttgatgtttgtctttcctgttcacatctcacatccagtcagtcggtgaatcccttcttgccaagcttccaaaatagaatgagaaaatggccatttctcactatctccactgttcatatgttggtcaccatcttctcttgcctggattatttttaacagcctcctagttggtctccttgcttatagtcttgcctccttccttcatttttttctcaacacaggagcctaagtgatcttgttaaacattaagtgtgatggggccatttctttgctcatatgaagcatcctcataacatgtcccatctcactcagggtatgagttcgagttcttccagtgatctacaaggatttctacaatctgtctcctccctggctcttccacaaccactttcttccttgctcatctagggtatacccaagatgctacacagcaagtatggccttagagactttgcatatgcttttcctctttctggaatgttcatttcccacattttcacatgactagctccctcatttccttcaagtctttgctcaaaagtcactttcttagtgatttccctgttggatatcctatctaaaattgcatcctctttcccattcaacactgcttactcttcttccctaaattatttttctccttagcacttctgattacctaacatggtctggatttactaatatatcttgtttcttgcctctcttccccactagaatgtaagctctaaggagagctaagatttttacctgttggtcactgcaccttagaacagaacttgacacatcacaggcattctgaagagttggaaaggggagcccccagatggacttgtcttcaatatactctgcctcttagtgacaatgaatcagcaatggcttttttaaatctctctgtgcaggcctcaaacaaaatcaggataaaggaactggacactcagcttgtggggctttagcctatggtgttttcctctttgttgctttcacagctaattaatgttgcaccattttttgaaatctctgaatagtgaaatggtacttcgaacctgcctcacaattttgggtatcattcttctttcccacagtggccccagtggtccttataagtgatatcaacttctctaatgaactgcatacaccaaatgctggggagaacatgatgatatagctaagtgatttcctaggcaatagatataaaaggcatttgggcacaagatgacaagacagcaagaagaagataaaatccccgtctaagaatgttcccccaaaagcatccaatacacccccttctgccttaataccaccctccacccttgagtgcttataatagaaggtgggatgctaccattgtgtgtgtgtggagctgggaggagaaagaaagatggcccaatgtggaaagaacttagcctgcccaaagctaccttttctatgtacagttaaatccacacttaacatcggcaatagttcctggaaactaactttaggcaaaacaacatacagccaaaccacattttctcatcaacgctgtaaaaaaatgatgttgaatgaaatgatgtcatttgaggacctgctatagttggtttgcttaaagttgcagtttccaagaacctaacaatgatgttataaacttactgtattcctctgaattgagcttagtgaggtcagtgaaggtatcagaggagtctttttgtgactcttctggtgactccaggaatcctaccattaatgacagagaggggactctctggaaccattaaccctgtgtatataatacggtctcaaaaatgatgaacaatgaaaatcattactggcatattctgggtagtgatttttgcctcttaccttacttgatattttaataaactcacatacagacctcaatgacttctgccctcgatatttcagtttactgtctaaaccagtggttagcagcatcagctgcactggggcacttgttagaaatgcatgttctgaggtctcacccacagctccttcatcagaaactctgggctggggcccagcagtctgttctgaccaaccctccagggaactgtgatgcaggttaaggtccgagcagcctgactataaaccactggtcatgttgtcacttcaaaatcagatgtctcactaccctcccaggccaaagcccttagtgcggcatttagggactttcctaggcaatcccagctctcagtgaactaaaaatctcacaccccagacaacgtgtgaataaagaaatatagtatattcgtaggtcttctgaagggtcttctgaacggcctcctcaaccacacacccctttctgtacctggagagctcctgctcagcccccagggtagtgtccaaaccatgatttttccttgggcagcagccccattcccactcctttctccctggaagaatcatttattccatcccctccatgatcccttagcatttggttcacaccatgattagaacacacagcacaggatattaattacataattaatgttgcactaattcatttatgtaactaatactaattatatatctctctacttaggagattttaagccttctaagggtataagctatttgtctttggtagtaactggggtggggtggggtgggtggactctcattgcagagatacacatttactgagctcctaccacgtgcctggtaccatattagatgccagtagttttctgagagacatacttgccattattttacttttcaaattaggtaagagttcaggcttgacctcaattggtaaaacagaaagcatggcctactggagtcttggttgctgttattctgttctggtggtttcattaaggttcacatgaatcaaagattattgaattagttacaatagtatgactgtaaaaaaaaactgcagagaatatggtgcactctcaatatatttgtaacacgagttcatagtaaggcatgagagatttaaaaattcttcactcttgagattttcacctgaattcaggctaaatatggggatgagcaaggctcaagcttcccactttatataacacatttgaatatccccttgtttatcaacacgcaaacaagatgaagatgatgagtatcaccagcaatcacatcagaaatggtagacaaggcaactgcatgtatgatcacggcacagaaaaagcgttaaatcctttcccttgaatggaaagactccatgcccagagctgaggatctgctcatgggaagcttgagaaaaaatagacagaaaggcaaaattaagagacaaaattaaagcccttttctgtcccaaattaaaattgggcatgaaatggggtgctgatgcagaggggaggaacagaagatcagtacaacaaataagtcagaccaaaacactgaattattttatttaatgttgagaatgcaagatatcattactgcatatatttgaggagcaaattcattacttctctccctctgagtggtttcactgatacaaatccttctttcctgggccataaaatgatcaagcgcaacttaaacgccataaacatgtcctcaagatggactgcatttacttataaacaattctcaattgagtgcttcccacaaatttatgttatatacttattttgctggtttaaggattgccagtgttaagatctgtcatcagtagatatttggttatgtatatctagcagtgtaaagaggagaatcaacagtttttcattcaaggaatcatactccaaccagctgcctttacagttacttgaagagtcctcttcagcaatattttttaaagcaacatatgcgggagctacctcaagcatatttttaaaaaaatctttgtaattagtaactgtttagaagaaatagtctaatagcaacctaatatatactaaaaaaagttctgtctgatttttgcaaaataaagcttaggcagtgacataactatgaacatgtttgagcaaacaagaaatatattcctaaagaacatgcctgtatataatagtaacaagcattaatggataaggtttaattaaaatctccttacatactatagaaaatgaaaactaatttatactctcccagctggtgggcctcacagaggaagagacaagatgctccatggagtatggaaataaactattggtacttctattttttttttaatcttattctttctagatctctacttctgaaagtgtatcctaataaatactatgtacagttagtaaatgttacactatctatacagataaaaatcaatatagtgggtgtgcctgctcaataacttttccagcgataactatgtgtgatttgaaaagtttaggctctgtgactctaagctgtggctggtaagagatgcatgcaggaagacctcaatgtttccaagagagcagggtctaattcattaactaattctactgaaagtcttatgcagcaacataactatgagtgtgtctgagaaaacatgaaatatattccaaatgtatgaatctgtatagtaacaagcattagtatattagatttaattaaaatctcttagacaactgttgcaaatggtactaagccagaagtagtaaaagaagccaacaccccattaatcacatcaatatcccagagagatcacaggctgccatctgattgctcctcgatgtgatctgcctctgccatccccaaatctttctgaggacagacagtgccggtgctttctgatttctgtgggcatgcacaccccataggtgctgactctgcctggctatcttcactgtgacctcttcgtggtctcctagcttatctcctttctcttggatcaattacagaggccggactccaggttagtcctcctgacactgggagaccagcacctccaaatccctgactctctaagccttcttgtgggtcccatcagaacagtcccccaaactgagtgcctatggtgtcagcctgctctcctgggtgctgtcctgcacgctgaagacagccccctaggagggtagaatgaatttacactacaggtatgccattttagctcagcagtcactcctacttggaaatccttccaaattccattctctgcgatgagtatttcaaaatgttctagatttttccatccttataatgaactcggtttactgagatgattagagtcacctaagatcaactccctgagtatccttttagcacatttcaaaatgatgctgttgctacattcatttcccttccttcaaaacctcttcatcctcacttaattttcctgattcacttctacctgagaggagagcccctctccaaggttagcctccttctgcactgcttcctattaccaagtcatcacttgtccttttctacccttgggcctctgtctttgttgttcccattgcccagaacacctcctctctcgtctgcactcactgaaatccacccatcggtctcaagcaagcaaaaatgtacatctgccttgacgtcctccgattatgcctccatgagcccattggctccatgctgctcaatttttctcacgtgtttctcttcccacacttaattgtctcctgaatggatgaactagttattcatcttttctgttccttggtatcctgatgcttctactatggtctttaaaaaaattatattacaggtaccaaatatttgttaagcaataaaagaaataatggagacagtggcactcacagcctcttttcaatatacacttttctgaaacattttctaattactttttcatcctgaagtgtgggcaacagtgtgacctgcattatagtccttttctgacttacctgtaactgtttaaaggttttagaaagtaggcattacgggacgtaagagggcaaattgtaaaacaaagaaagagaaaatctcatttaccaaattccctttagagagaacattgatttagaaaacatactgtgataaaacaattttagggtaggtaggtatgaggctcctaaaagacacgttaagaaacaacagatagtctctaaactgcctttaggagggtgggtcctgttaacctacacagtttagggataaaggctgagccagtaggctggagctgaactcctaggcttagtaaggtggcagcacttggagctcccaggaatagctaggcaggaggaacggaaaggctggtgctcttgggagaacacaatagtctaatggggtattttaagttatttgctctgagatgtatctgcaatgtatcccctcctctggctccattagggacactttgggaacgttcaccggcttctccttctggggagcccaaaggagggcagagctctgcagccaggtgggagtaaagaaagagagacttggtcagcagccatccagggacacaaggcaagggaacagttgccatctggaccatgtccgcaactgtgtaacagttcctaatccaagcaggcttccccctccagtgcagtgggccctgtgaacctgaagcttgaccaactgcagaaattctgttcaaaggtacttgagggaagaagctgggcctctgcaggaagagcctggttctaaagacagcacattgcacaaggaaagggcagtccaatgccagtcctcgatctgcccgtctgtgggtaacacaaatgggaggtgtatggagcttggagagtgaagattcctgaaagcaggggagccgctcaaataggagattctacagccattcgattcaggaaaatctcagacacatttctatgcaaatgcatcaccgacaagtacagaaggtgcctcagagcctcaggcttgtgaacctggtccaaacctggtgtgctaggaagcaatgagcctagtgattgactcccaaattacactcacactcgaggcagctatgaagtgctactaagtccaacagggctttcaggctggcccaaatcctgccttttgcaataaccagaaataatgacttcccgatgctttaacttcagcatcttcaaaacaggctgtaataccgcttatttcagtatacttacctcacagggtagtttgaaggtaaatttaataaaatgtgtgaaggccctgagaatctgggagatgggggcctttaagtacaagattgtcactgataaagtgcttccccctctgccaacacctctgtgaagcaggtgaggtatacggggacttattctactttaacacggtgggaaattgcgagaatgacagtctaagcaattttcctttaaattacccagatattcagaggcaaaccaaggaatgtaaagtctccaccagtcatcatgagataataaaataatgaaaagctctgaattaactctgacttggatcctgactttagcccagcaacttattagtcgtgtgattttggataaattactcaattctttcaggtcccgatttcttcatctgtaaaatgcattcatgattcctaacctgcagatgaactaaaaaaaatgcgaagagactagacacagtgcttggacactcaacagatggtgactcctggcactgtgactccgttcttaaaaaggcgttatattattcattactgaaaggtaagcgtatccatgggtagcaactgcaaaagggaaagttcaaacgattttgtgattttaaaacaaattttattctaggaagagatgcaaaactcccaaaattctgaaaccaaggaaggaggaatactaatataatcttataataaaaaaataggaatttgagtgaaatggaaattgaaggcatgaccataaaataataactgcttttcttctgtgcttgtaactcaatctcatttcttcttagtcacttcttacacaggaagcatttactttgtgaagataaatatggctgtccaaggaagggcaatataaaagatcagttggtttgtgtgaaaaccgggaaagaaaaaaaaattttttttcacttttcagtagaagactgaaagtttgcaaagagatgggatgggtgataaattttttaaaaatcctaggataaaatgtgattcttcaagtcttagtgtagttactttcacttgctatttatgttttaaaatagtacagaacctgaagatttaaatctaggtggacatggcataagcaacactccatttgtctcggccgtgctaatacacgtgcagggagataatccatcagttgctaataagcacagattcagacgccaacactctacactttctgaacatctatattctatcaagtagggagtatttccaaaagatgtatctgtacagagtttatctaatagactggaatggctcttatttctgttctgccaaataaagagaaatttcttggactgcaaatgtgattgcttgaactcccaaactgcaatttttctaggcatttcttcttcatgcttcctggcaggccaatctaccatcaaattcttcaggtttaccaaagccttaacaacagccccaatttacaaagtacccatgacttggtcagcattcaaggcaaaaagttaaaacatacacaaaaataacagtagattttgaaaacaggcaaggatttgaaaacgaccattatctctagggcaatactaaaatatagcctcaacttataaatgtgtagaaagtagtgatatttggaaggtacattaaaatgagtaagtaagggaacaagtatggctcagtgcacttagacctgacatgaacattaggtatcttgatctactaactagctgtgtggccttgggcaagtcattcataatttcctaattggtgaaatacaaatactacccccattttggtacattctccaaatttgtggaaatgtctagcaaaatgccttgggtaaagaaggtgcttgatagatgttagcttctttccttgaagagctgcaattgcctacagagatcagtcaagaacgaagggcagtgcggtccagtgcatggatgttcagcgagagcaggagtctaccatactatctgagaacatccaattgtgctatagaggatggatgcagctaattagtgttaaatacagccagtaaataagcaagaagcttatgaggtataggcaaatctcataggatctgtcaaaacagatctaggatagtaagcaagtagcctgtgaggtacaacaaaattcctaaggtgtgcaagctgtgttaaatacaggccacaggttgataaactgtaagacatgccaaagatagaataattttaaaaaaccaaacatgatggaacagatgagaatgttacttagggacggaaagggagggaaatgctgcctcatgatatgcaccctctgggatgacagctaagtctcccctgaactgaccagccttgatgacaaccagcctggtcccatcctggtaccatatgtgctctactggagaagtacaggtgaaacccaggactgctcacagcaggtggctggctgggtgtgcctgtgcctgcttcctttcatggagaaggtgcactggctctgggcaccctttgtctgccatggcccctcgtctaaaacttcactctggtccttttaagcacatagtaagtacgaaaggctgagatgacagagaggggacagatgaactagttgtgaccaggggtcagatagaacacccggcccacctgctagcccaccatcagggtgccacctacccctccttcctctacatctctgtgtgcttttgaatgctctgtgagcctttctgtacggtgcagttggactctgagcatccctggaggccaccatgtcatcaaggtgattttctccatgacaggaaatcccaaggtctatggccaagtggagggcacacacctgccctaagaggagctgctgttttgccctacgagtgctgccttgcaggaatgttggccctagttcctgcttttactgacttttcacaggatcttggcaaatctgggtttctatgtcaggtctcccaagttttaaatactgacaattcatgcaaaatttaaaaaatctgttcaggccaacaaaaccccatatcctccaccaccagtttgcacctgctgcctcgggttaatattgttccacgactttgtcagtccctggccccacggtgcctgccatgtggttcttcagttgtaaaaacaagatccaatttgaactgctgccctgcagttctgcaatttagcatgtctcacttcagggtcttttaagttcagggaggactcagcagatgagatctcttggccctaagtgtctagggccagactgactgaaattagaagggggagctcacagacctaagttcacacaatggaaaggagaatggctgccactgactggggtacttgataattattagcagatggtcgacaagttttccctggaacacttccgtgaggttatacatcctcgttatcattcattactcatgttttctctgcttctccctccttctcaggccactgatcaggagtcagagcagaatgagacaagaggagactgttactatggcacctaaacaaaacccagatgattaaaatcaggaaagcttttgtcctggacatcatgtgtgtgacctaagttgtctgtgtgtagttctgcatttcttgggtctctaagtggacaaaagtgatactggtcaatggggctgatgccctgcagccatgtgagaaaaggcgggcacctcggagcgtagccggaatgcagaaggctccttagaggagatgacaatgggacacgtgcttctaagagcaaggggctggagggtgcccggcagccaggacaatgtccagagggtgggcagggggcatagaggtctacctctctgttaaggaaagccaagacaaaacagatgtaccctgcgggtgctgaactcagcccagagccaggacatgggtatactggagcgctggagggtggtgctgagaaggcgggagggaaggtggggaggagggaagatgggaggctttggcatgcttggactcggacacaatcaagaagctcgacttgcccacactctccctgcatgactaagagccaccagccacatcacgaggatgagcaaggggcagaatggctcatcagtgactgactccatcagtgcggatggagcatgaggagctgggtgggggcgggggggaagtttacaaagggcacacggtcactcagtcatcaccgaagcgccagacaggctgtgcctaatgagagcacctgtggccaggctagcatgcatcacactgctgggtgatccactgggtgactggtaccagtcaggcacggggtgggcactgggggggggtctgtgtcatacaagactgacaagggccctgggagcttgtacccacaggggaagatcagcaaacaagacaatgactgaaaataaccagactgaaagcaacacgactgtgagctgtgaccttggttgtgaaagaaggggagtacccctggtgacaggatggagaacagggcagggggcactactgcagatgaccactcagaaaaaagatgagacaacaaactcttctgccgattacttccagattttacaagaatagaaactctcgggaaacaaaatattaaaaaataaacacaccagtgttggcttatttctttatgttaccgtgttgacatgtaagttaaaatgcaagggatttcaaacaatgctggaaacaccagcttatttctatgacatgagtgtgatagtctctgctcgtcttaaccatcaatttcccaggcccgtgttttgtgctatgctgaaatgtgatttcaaaattaaattttacccactctggtcctaactaactgaaaatggcaagcataatgcagcgtaactgatgccacgtgtcagtgactgagaggcatgcgaagcggggttgtaagatgactgctgtcatccggttaatggcattacttgtggcaggtgcagctgagcgcaggcacaaattttgcagcttcattctgctgaccagcaggtgacacacagcaattttcagcctagaacgtgctgttctcagagagaagccagactggcactgcttcagctttccccaccccatctctatctctgccaccagtcagcaggacatgcatctgcagacacagtcccagacggatgtgctactaggacccgcaggaaggtacagcttcaagggtaacaggaattgatactctgacccagggtctcctgggaggagtaaaacaaagtggggagaggggcgacaccaaaatgataaccttttgtatcatcaggtaagaatattaaaacaaacaccaacaggaaagaaatgaatacacaaattgtgacatatccatacagtgggatgctattaatataaagaaacaaattactgttatactcagctacatgggtaaatctccaaaacattacattaaaggaatgcagccaggtacagaagataaatgccgttggatcccctctccatggtttgctagagcagacacgactaatctgtaggtgcagagggcagatcagtgcttgccttggtgccagaacatgggcactgactgcaaacggccaccagaaacttctggagggcctgcaaagttccaagtcctgaccagagggctagttacacgggtgtatacatatgtcaacactcatccaactacacttaaaatgtgtgctttcactgtatataaattacgcctcaacagagttaatcttaaaaaactaaatgagatcaaacaacaaaaacctgtctacttatatatcctcagttatttcataaaagagttgtttttaatgcccccaaataaagcaggtatagaagacagtccttttgaattaaatagattttggtttaatgaaaaactctattattctcattttaaagaccagtggtggaaacctcctcatggcccagcaggggtcagaagatgagcatctgggaacccccgttgactttctgccctcccttgaaatcacacgccctgtgtcgtccctggaacattcccttaacaggctcctgactacttcacgtggcaatgggcagaccaaattggagctcccacactggggattaaaatgaaaatggccaggaagaagcaatgatttcaatgactaatgagtcctacctaaaaaaaggttggcagaagagcgcaggaagcagagcgggtgaggagggcgaggggaagatgacaaaggagaacctgggcagctacacccctggcgtgttgtctccctcctggggcccctcaggcctcaacaccaagtgggccctggtgtggtcacacaaatcagctgggaccctaaataagctggcagtgacaccagcaagctatacagcaaacaggggtcttataccagggggtgtcagaccctgccctgctggtcacagagggcacagcgtctcactgtgtgtactcaggaccatcatgcgggataacgaaaaacaaaaactgattttttaaaagagaagcagcaaagatttttctaaattataaagtgtaataatatatctatgtatgtacattgatgttaaatctcccttcaaaaaagcttaaaactgaagagaatagtctcttttaaaaataatactttttaccttagcctccttaaatagccactggttcaccaagagaagaatttagtagtagccaaaatattaccatatattaccataagcatgactatttgttctagaaaacagggcctacgcatgaaatgtccaaatgactgagagaaaaggtcagcaatctaaattttaaattccaaatgctgagggcaagcaaacaaccaaaaagaaaaaaaatcccaacaaaatccaaaactctcataaaaacataattgtacatcaaaagtcattaaggggacctcacagtaaactctcactcatcccatttttatttttatttctttttaataacaaacacttatccaacacttagtatgtggcaggcactgtttcaagcactttacacatacaaactcatccactcctcataccaacccaatgaggggggggtttatgattcccatttgacaggtgaggcacagtgaggctgtgtgacctgctgaggttgcctggagatggcaggatatgaggattgtgggggcagggggagggtatgctatttagcagctacctctttgcctggatcgaggctgtttttgttgttttgttctggggaaggcctgtatattcacatcatgtctgtttctcatactaccccatgacaaggtatccatatggggtggaaggcttccacacacctacctgtcaaggtatcaggaggccctgcctaaacggagaactagacattctccaagttggtgctaacacattcctggtgctcataattatagcacctagggacgaacagaaaaaggaagcggaacaatgacacgcttcagaacttgctttgagaaatgcaaagaaagcagagctctgtggatttggattttatgtatcctgaagtgatcacctagattccataaggcctcatagaattttctgtatttggtttctctaacttgcatgggcagtagcatcttcacaattttggccaaatctgcacaccacctgattattatttgcttgtaatttttatttaaatcaatgcagtttttaaaatattaaatatctttttatctgagttctatacatgaaattgatttaacagttatattttattaacacatttatctgttaaagtaaaataaatccgtgtaccaactaaaatcattgcatgtacctcactgctgttgagttctatgtgctggggaattctaattctgaactaatggaagccagtcttcactctctaattaaaaaacacagtcatgatgcaaacacaacttccgaaattgtttttatattcatgtataatcacatatatgtacaaatggaattctacacacacacacacacacacacacacacacacacaatttagaatggttgagaacaaatgaaaaagaaattgaccaggagatagatattaggtcaggggcagtgggaagtagtggatcaaggacatagcgtaacatttaaataagaacccacataattggataagcaaagttaagaataacagcaaaggctgggcgcggtggctcatgcctgtaatcctagcactttgggaggccaaggcaggtggatcacgagctcaggaggtggagaccatcctggctaacacagtgcaaaccctgtctctactaaaaacacaaaaagtcagccggacgtggtggcacatgcctgtaatcccagctactcgggaagctgaggtaggagaatctcttgaacccgggaggcggaggttgcagtgagctgagatcgcgccactgcactccagcctgggcaacagagtgagactccatctcaaaaaaaaaagagtaacagcaacaacacacaggcatcatgctttctcaatgaaaacctcaaatatataaactgatgccctgtttttttttttcttttctaacggaaaacttagtatatagaaataaaatcctaaaagtctggttagctagaaaagaagttatttacatcatttcctcaggaaggttgaaagaatgtgacatctgaaaagagggattcctcagagcccagggctgccctgagatgcatcaggggtggggacaggcaggggagacggctggctctaggctccttcctccctccccactctgtgtgtgcccagcagctctaggcttccctgccttttacggtgtccttccacataagatattctttgaacaaaggagtttcacagataaaataaaatctggagaccactggtactttccaatttcctcattgtatcagtggggaaactgaggatcagatgacttatggctgctcagcaaattgcagcggggtcacagtctacagaactcagtgtccagattcatggtctggtgttgatctgaacaaaaccacctacagcctccaagaacacccttatgcatgcacacactggtgatcctagtggacttcattacatcaatacccttgctgatccttgaagaaaaagaagtgtgatttatcattactttcttgagaagaggatggtggccagcaacattatttaataaagtgttatgagtcaatgaaagcaaattagcaaaaagatgaagtcattatttagaaaaccatgacgtaaggaaacaggcacatctcttcctgaaaagttgtataaatcaagaaacacttgaaacaaatgaggagggcttcctaattcataatagaaacaacaatgaaaatagcagtagtaatagcagcaatagctacaatttactgtttataccagccacaagatgcacactttatacgcactgatattcctgtgacataaatattattagtctcatttttatagatgagaaaaattaagactaagcccatggggagggtgaccaactgtcctggtttgctcaggactgtggggtttcccaaggtgtgaaactttaagggcagacattaggaaagtcttgggcaacctggatggttggtcaccctacccgtagggtgtgggtgataggaattccatttctgtctgccttactaacaccttctatgaggtaccttccttccatgtgttacagtcaagagttttacagactggtttaaagaagggcaagaccaaatattttacaaacaggatattcacatgcagcttcatcccccttttgaaaaaataaagacagataaagcactgcatagtctccaacctccattctccagaagagtcaagaagacactcaccttgacctcaaactcgaagtgtgcatcctttccttgcccgcagaggacgtagcgtgggatactaattttaattgggtccttcaggtcatctggatttgcgcccaaagagcgagaaaccatccgctatcaaaggcatgtcagacagggagaacaaagagaaaccagaatcactccactgcaaatatcctgctcgggtaggagggagaaaatgtgtttcaagtagagaaaagagcatcaaaccagtagggtttatttagaaaaatgatggtttcctttgaaagagaaaagctaagcctctctcataacaaaaagaccattattttaggtataccgttccaaggagttagggcaaaagcactatgaagtgtttggctttgaagttccttccaatttataagaacaagtaaaaacagggacaaattatattatcctgacttcttaaaaaaaatcagtgtaaaccagattgccttctgaaaagtcttgaccatctgacaaacttttttcttcacacactatcagacagctatacttataaagctgcaaaagctagagattttattcaaatttacttcatttttaacttttaggcatttttataagccagtgtagtgtggaaagctctttaaaccacaattaaaacaaatctcaagtattttctttaggccccatttgattactcaacttggctctgacaaatatttatggcctgggcagtgggggactagtggggtctgaggaagaggcattatgaaaaaaataaatcttccaaatgaagttgtcttaagtgtgaatcggaagaaatctctgaacaatccttattgtttgcattaagctgggggctttagaaaacatatgtttttgaagtaatagcaataacaaaataattagaatcataattatagttagcatttattggatactcattatatgccaaggactacattaaccagtttacatgaattggctcaattaatcttcacaatcccccctacgaggtattaaccattattcaccctatttatcagatgagaggcccaagactgagggttgagctcacttgatggaggtatggggtagagtcaagatttaaactcaggccaatctagagcccactttcatcacactactctagattgcaatcatgaaattgtacaataattacatccatctgagatacattgagctaatgaacacttcacacatatgtaggttttaagatgctgagaattccatggttatgcaatggaacccacttatgtgactataaagaaaacagggggcaataagctccctttctcccagacagaaagggttctcagccaggtgtaacttgagagtgtcaacttagctgtgtgcatgaaagcttggacttccagaggacacaaggacatataatttgtttcagattgctgcttttaatctagctgactatgtgtgcattttggcatgaagtttccgaagcctgttataggatcttaatttttctctgcatggctagtcacccaaagcaagaagaattaattgtttatcataatggtacaccgatttagctatccctgatatcaaaaaccatcaagaggctgggcacagtggctcacacctgtaatcccagcaccctgggaggccaaggcaggttgatcaagaggtcaggagatcgagaccatcctggctaacatggtgcaggcctgtctgaactaaaaatacaaaaaagtagtcgggagtggtggcatgcgcctgtagtcccagctacttgggaggctgaggcaggagaatcactcgaacccgggaggcagaggttgcagtgagctgagatcacgccactgcactccagcctgggcgacagagcgagactccatctcaaaggaaaaaaaaaattatatgggcttctgtcacttgaggcacatggcagtcacacatacacctgtgagggagatgatctgaaaggcaaacttcatgtttttcagttttgcctagggatacctccatttacatacttgaaccttttaggatcacgtgaatgatcgggttctcaaaaaagtgtggacgacagtatccacaagcataacatactctaactttatctgcttccctgacctagtcacagaaaatggacatgggattccaggtgatgttcacttcaagactcagaaggaaggataagatgtggaatccaatcctagttctgggacttggtcttggagtaagtctcttgcccgctcttcacctcagttcccctatggaaatgggcatggtatttattagattccaactacatgggagggacccaactatgaacgcaatggtaccccaccctgtgggacttaaggtctgaggcagactcttacaagtgaactggtaatcacagcaggattagaaagttgtgatgggggaatggagtgagaacaactatgaatatgtatcttgtcatccaaatgtcaggaattttactgaggaagaactatggtcaaaattgcctaggcatgttctgtcagctaagcaatggagacttacctttgactttctaaatgccttttcttttaggcacccctaagatatataatgaaacattgctattttactgggtaccacctatgtgccacacagagggtcaggccttgggaatacaatataacttttacaaagtatttgtaatttctaagacctttagtttttctcaactgcacatgtttggaacaaacttttgatgtttctactctagatggattatattctaaaggtagatttgggaccttaactttctcttttcataagtcagtttttaaaatgaggtaagactgtaactgacggtctgggtattttatgactggtgatacggtttggatatttgtccccatccaaatctcatgaggagttgtaataatcttggtgttggaggtaggccccgtgggaggtgtttgggtcacacgggtggatcccttatggcttggtgcagtctttgtgataatgagtgagttctcaccagatctggtcatttgaaagcatgtggcacctccctcacactctttctcttgctcctgctcccactgtgtgagatacctgcttccccttcaccttccaccatgattgtaatcttcctgaggcttccccagaataagaagccagtgctatactttctacacagcctgcagaaccatgagccaattaaacctcttttcttgtaaattacccagtcttgggtatttatagcaaggcaagaacagactaatacaactgcagagttctccatttctaagaatgtaccagggtaaaaccaatccctaataaaaggaaagctgcttgaggctcaggatcatagattctttacaaaaaaaaaaaaaaaaaaaaccctgcctttgacaatttcactgggcaagtgatttgagtaaggaccaggtatttgagaatgagtagatcttataatattacgtagcctacctcaatctagggcagcctttgacacactagcaactgcctggactaatatatggcccttggctggatataagagctactgtcccaaacgggaccagacagtgaagcataacaggatcctttgcagagaagaaagatatttctctcttcattacatatcatactggggatgagaaatactgccagagtccccactatcatccttggctacagtttacttcaatcttactgatttcatatgaactaaatattaatgagtgtacagaaatgaacagctacagaaatgaacaactaaaatataaggtagggatctgagcaaatgcataaataaatttaaaaatcaaaatgtgttcccatcaaatcatcactgtggtgtgatttgtaaacattattttatgaagtcaatttcatgagaaatgtggaattctcagggtacagtgtaaaaaattcttgacactctcctaaactatgtttatactggacaggaagtaaagttaacataaatgtctcttaaatttatttttgatttgaaagtggctatattttgagtatgttgaggtttatactagacatgcaaatgtttgctgtatcccattatatcccattatttatgggagcttttatatttcgatggcattatttattttggaatccatcacagtttccctatatgtggcaaaaaagattcttagactctgaagggaaagttgatggcattgtagtaggaggtgtgaggaacacctctctgcaagcagaactggtgtggatgagtacagaaatagtataagcaattttaaatgtgccatggagtgatcctatttagaaataaaaagtcaagaaaaagtagataattggtaacttgaattacatatctgtacataagaagtatctttaaaagttaaatacaaaaaatattttttctgatagcttttaatgaaataatgctctgtgtcaacaaatacgctatttttccattcttggtgaaacactgtagtccagtccttagctgaaagaaataggcagaacataaggtacattgtaaatattcagttcaaagtcttcttttactactcaggctatttccttcaaaaggaacaaattgaggaaatgaacaggaagcggcacttacatccactcagatctctgcgggctctcagagaacatgaaacggtccaggtcctcagggagtcattaacagttgtccctaaacattctaattatgtaccagacggtcaaattcagtatacacatcatgacaaggtctggcctaaggactgccatctaatctccagaagcccatagccaagctttgcttctgaaatacaggcaaacctggctttttattagatttaacaaaattacaaattctcctgtccctgttccaaccatagcacatatttctaatccttccttttttcaactacacatactatactgatagttctaattagagctattatgtctcaagtacctattatgccccaacaatttgaaaatggagatttggggaaagagacgacgaagatttggggaaagagacaatgaagatttgttatagcctcaaacatcagccaggttgtaagaaacagggaacaaagataacatgcaggaacaagcacaaatgatgtatatggtaaataaccagacaggttcctatccatttccagtagagaagcctgcctttgctatgaggggatcttgtcttaattaacactacactgtcttcgaaggcttggcaaatacatctgatttggattttgccaagacgtggccatatatgctacagatacatcctgtccatccctgtgaaggatgggacttaacaatagcctggtgtggagaaacagtgctaaccttatctcatttctaaagtgagtctggaagactcacatcaggaaacaaatacaagttttgatatatatcctgagggataagttacccagaagatggcaaactgttggacattggtacttgtagaatatcttaagtttagcggcctttggataactccaaaaggtttagttgacatttccaatccatgattctcaccagaatcaattatttcttctacatagatctgagccgaccaacattgtttcaaggtttggaaatattgaatattggatgaatgtttcaacttgaaactattaaaagtgtcactatttttctctagatcaccaaagatcattgtattaagtggtcatcatctttgaacaatgtatcaattaacggctgattttaaaaagattaaatatggggtctattatacctgactgataatgtcgcaacaactgctaagtggctctcactattaagcatgaatgcagacaggttaggaccctcagggaaaagtggatattctcccttctattataattgtacaatgtcattgattaatcatgaaaagtaccactgatgttcactcactgattttttgctgagccctggctttgggtcaaaccatgctgaatgctaaggcccaggagaaaataaaaggcagggatgcacttccagccaaagaagcaaaagtaaacatacaaacttatgtgcatcaaattcacgctatgactgtgtctaagctttcttttacagagctaaaaaagcagagcgcaaagagaagtaagatccatgcaaggaaataaaaggaattgaaaagaaacttgtaaggcaatccttgaaaacaacaactcatacagacagaattattaatgtctagaattccaagaaaacaaatttacaggtcagttaagaatcaacttagcaatacttggaaatatatatttctagcatagtcattcctataaaaaaatcaataaaaaattttaccaatgtcaagaataacagtgactatgaaatggctttggcactgtggacaaatatatatattctagagtagaaaagtctagatttaagtcccaattctcaacctagtaatcctttttgagtctaaatttccaaatctgaaatggagttccacgtgaattcctacattccagtaggatcaccataaatatcaaaaggaacaaaatatgagcaagaagtcctacattgtaaaccacaatataaacagtgactgggattgctgtcacccctataacccactacaccttcagcaacaaaagattttaaccagatagtaaaaggcaggaggagtgacttataatagaatctctttccttctcatcaactagtttattcaattccatccctcataaagaaggcattagcatactacaacactgcatccttaacaagagatttgatggtgatggtttgaaaaatgtactgtttaagaaacagtggagagacggaagggtgttggaggtaaaggagaaaaatcagaggaggcagatatatgagaagtgtcttctctgaagggttgtgtataatgcagattacaaaatacacttgttttattctgcaacagagggtgccacggatgaacagactctgcagatggagatcacaataagggagattacggaaagaatagtgtaacagtaagagcagctcccaatgaaaaaactgcttcagaggtagaaggcaatcagcccatccatggaggtactcaaattgaatatgtaacttaaaaggtcctagggcatactcttcccggtaccttaatgtttccattagggagaagtcctacaagttttatctgagtcttatctgtaatagagctttgggaaccttgacataatacatccatggaaaattaattgccggtcctaattcttctctccctatagtagtagtacatatcctgagtctcaccatggcctcttgatggacggagggtacttccttgccccttgatttggggcttggtcatgtgacttgtgttggccaatgagatgttagcagacacaggcaaaggcttgcaggactgcccttctgtgtttctgtcatcaccacgatggctactgccccttctgaataggtcccaaaatgatatgtgtggagcagaccgaccctggttgagcaacagatgacctgcagcgtacagcacagccactccaatctacttgcaaagcagcagaataaaataaaaactttttttaatgtgccactgaaatttgggggggttgtttgttatttggcaattgcagactgatataacatctgtcacaatagatattctaaggaatgaggcagagttgtctaagctacatactggaaattgtgtaactaaattaacaaaatgacctcattagaaactggtctatccaataagccgggttgatcatcaaaggagcattaataaaagtggctctaatctatttatcatacaaagctttaaatcatctgggaaagagaatgtaagcaaaaattactgtaattactactgctggaaggcttaagtactctcttccaaagggatgcatgcacatttttaaagtaatgagaacagggagacacactgttttgaaatgtttttcaacaaagactaaataaattcatcctgccaaccacaagtctgtaaaacaggcagctgtgcacaaaatggattttaatcaaattcagatgaaatcactatttcaaaagtattcaaagagctattgtctagaatgtattaagaagtcccacaatataaatgtttatgcctatattataacaatgcagaatgccacataaccaagatgtatgcgtctatttttttctgattcagaaactcattacagccgagatgtcgttatagcaggctgaatactcagactctcatagttgctccactctaggggtgctgtaggcttagaactcctgaagaaacgagcagagggagctcctaggattgaagccacagcagagggagctactaggattgaaatcacagtggataatggcaccaacaatactccactggcttccacaggcatcacgacaaccttaatacttacttcacagagagtaaatcaaactctcacacagaggaactatattttatctcgaggtacaaagtatgcttaggtgagagaagtgacatgctgaatctgaatgctgcaagctgcttctattatgtggtacaatctgaacatgatcctcattgtggccttcttagatcataaagcagactgcagaagttataatgagtgatatgatttttatacgatgctcgtatctgctgcatgttccatctctgagaaatcctaaaggccatgatttacaacatggtggaattatgcttctgtacctgtgcgaataagcacatctgtctaatatttaacactctttgttaaaattatgtacagtttatttatcactcccttcttcctgaccatggcatccctctgctggcatcttaaaatttattccctctgcccttcataatcattaattgtttttctttctttcttttttaacttggacaagactactgcagtataactctttttcttatcaagaaaatatgagaaaatactggatggaacaacttgaaaaaaggaatgcaaaatatattagttttaaaaagttaaaaaaataaaaataaattaggagaaatattattaagatattagaaaactatcatggtacattttaggagtgtttgttcatgagggaagatgacctaccaaccaagataatgacaaattagtgactatttttaatgatgtcctcatcaaagagttaaaagcctttaggtataaggtaataaggtatttatgtgtgggggtagggggtgctttggaaatgaaaaacatgagaatccaattgcctcaaaaaaccaaatgcctccactggtcagaagcacacatggctgcagccaccagtctgtggatcgtaacacattctccaattccctgtcttttcctgttcatgtctgcaacactaggtagaggaaaataggtgggaatgtagacccagtgtgggtagcttgtcatttcctccgtcaggggaaagagggaagatgagcagttcctggccaaaggaagatggtaagtttctgtgtgtgttaagctttgacaccatctccgtcattggttaggaacagaaatgaagaaggcactacaacatttatgttgcacttatccaaatatttgaccagaatagaaaatgccccttccatgccacgagaatcactgactcactcagctgcatccaacgtccactgagagctactgtgggctaaagatggtttggctgagagtggatggagggtgggctgagcaagacagaagcacgtctccttccttctgagaactctagatttaggagaacacacacctgagaggggagaacagtggcagagcacctagggtcaggtgaaattaaaaacaaatacaaaatatgtaacctgataggatttttggacagagggggacagagaggaaagggttgatcagaggagctagagaccctgaagagcacagtttgcagcctcttacctaggaggaggcagctgactactgggtggagcttcatggagagagaagctccaccctgggcagatgcagcagggaactcgcctgagaagggaggccagcaaactgaccagctggggccagtaggagacctcaatcaaaggttataagtggtggctgggtgagatgccagaggaaggtacctctaaggggactatatatttgacaagacagcagaaagaagccacgagagaaagtgagactctgagataaagagacttacaggatagagagacaaaagttctgagaaagaactggaatatggtggtggtgagggatacgggttaggtggaatagccacaaatacaccaagtgaggagctgaaatcgcaagagttaaaagggaatcatcaagaagtatgaaaggaggaaggtaaaggcaattaagtgaggaagaagacactgcagggcatgcatcactgtctcgattccgcataccatggtgatgggaggacactttcaatccccgggtcctcataggaagcttgatgcatcactaatgtgctctgctacataattatcctaatcacagctgaaaccaaggatgtcaatgaaggtcactgctagactgggcactttttcaggcagcacagattagcctgctggaatccagtaggcacagacagattccaagccaccacactataaatcgacacgaaaacaaacaatcagaaatgctttaatcacctcacaaataatgaagcaggcacaaatttacaagcctgagtttcaagaaaatgaagcaaggtgatgataaagatattttattggggctctgctattagctgtttttattttattgtagatatttaaaatatttacattttcaattttagaggtctgcatttttccagttccaattcaattagctacacggagatattcatattgccttgactgttttcacaatgcttattttattaatgatctcaaaaaacatgtagtgcatctttaaaagtctcctccttagagtcttgtcaaatgtgagattagccaaagagcctcatcttgagaattgaaagtaagtttccagacctcaggtgcgacattctgactgccttgaagatacaatggggtggtgaacaactggacatttggggcttcctgaaggtgctcaggtggactatttctggaacccactgaaggtttgagtttctgtaagaagactagttctactgttgacacatttttcttttctggaacaacaacacacctgaattcacttaaagcatggcatttgatcacatcaaattgtgcacccggaggaggtatgtttcgagatcgaatgcgtggataaaaaacacagtcttccttcaccagtgcaatgtgggtgttcagaaggactagcgactggcactggtcatggccagagtcacccatgactttcactgttgtgtagagcagtaactgaacttctgccagggaagggacattgacttccatatttccatgaagaaagtaaatcatgtcaaccaaggtagtctggaatttggatgacacctgaactccatttggcaaaactaaatcagggatttctgttttccaatcaagagaaagctgaaccagatcttgctggagcaagggatgattagcgcaggcagcggcatcaggctctggcatcaggacacacaggaggtcacgacacagctgttgagagaggtatttgttgtaactgaatacagtgagcagaagaccctctgcagagctcaggaatcgaacactctgtccaccaaagccaatctgaatctcctgtagaccagagagaggtagagcatgaaaaatgctcattgagccgagattatctgacaggaccaaagcatataaagttgactgaagcaggagcaaacacgctggttgagggtcaggtgctgtgcaggcagcaacagcaagccagtaaatgcctttgacttccttcatgttgcccaaaggttctggtagagaacaagtcacatgcctaagaaggtcttttaaagggcactcttgcagtttcagcatttggtccgggaattgcacaaggctctgcttaaatgcagagctctttctagcatcttcatattcaaggcgaaaaactgagcttggcgaggaacctggtaaacctgtagctgcaaagacagaggcccggtaaggcgccgcaccctctgctggcctcaggctccctgcagcttcgctctcgctgctgccaacccgagcttccggagaatgagattctgttgactgcatgtcagtcttcaagggcatgtgtggggctaagtgcttcagaaatggcaggcttctgacgaatgttgttacctgggaggggagccccctcggggcacacagattccccacaagcctggcttggctgatcacctttgtgccagcctgaagcaggtgactgctggtatctttataaaggtctgagaacttgtggtaaaaatatcccagtccattgtttccttctgttctgatatttaccagtgactccgatgagctcatttttttagcatccaactcttcctcaccttgctgctcactataaaactcagacgccagtacgctctgcggggcactgcaggatgctctctcctcatgggaaatgccttcagacagaaccaagcagagcaccttgccttgcctggcctgcttgcctccgctatttatagacacttcttgggacgtatgttgcagcaaagtccaactggacttgactctcaagccatgtttatctttatgagtcatcagctcactgaaattttctgactgactctgaaaatcttctgcatcatcggtgttactttcgttaagaaaagagattttaggtagattaaaacattttggttcaaaatggccagcatgctcaggatgaccatatttgttttcactgtcctggaatacctcgggtactgaggactgatccctctgctggtgagttctctcttgtgatgctgaggaagttgttttagggcctgagacgctccacagcatgggatgatcccagtggtcgttctgatccacctccctcctctcctctttaatgaggctggaagtgtcagtggcatctctgggcagaagcgggtcaagataccatgctgggcaaaactgccttttctgttcaaggtgtcaaaaaaagttgaaatggggatgtggtatctctttctgtgattcttttgcacatgatgattcttgtcattggtttcattgggtagattaattcagaggttaaataaaaagtctaagccatttgtattgatacatgattaaagaatcgattatctgattcatacatagaacatcaattttccatattatatatatattataaatcactgagaattttgatagaaatactttgtatggggttgatccacagtacccacgtcttgatctaatatttcattttccctacaataaattccaagccctctgattcaatgtttagaaggtcaaatttagttatgaaaataagtccatgatcatatgtccaaaatgcaatcaaggcaaacttaatgaaaatcagatggcaaggccaaaagaaatgcccaagtgttctaacccaggttacatttctctctccttttggtttgtttcatggggatcaaatgttcccatgaacattaacagtaattatcattactcttatctacaagtcatcaccatggaaggactactgtgcacctgctatgtgccaggtactatggacacaaagaaatgaaagccagtgtcttgctctgtagaggagggaaatggctatccagggaaagatcacatcattactggatgactggcaggagggtgtggctgcggccaaagtcagctcagcctctgtgaacatccacctcttgctgtctgttcagtaatgtatggacaccatctggaaaatttccatcacctactattttttgggggttgattttttaaaatttaggaatatatgggagagacatgcctctcagtggaggagaataccagtgaaaccttacaaattgcatgcccaaataaaccttggtttgacaatccaccagagaaacaagttaatcaatcaagagtatttcctttatactactaccaactcacagtctataaaatggacaggaggagtactgagtttcatttccaaaccccatatctgattctgattatataattctgccttttaaatgcagaccaagggaaaatatactattacaaatgaaaaactgggcaaagctccaccacagctacatgccattcaaataaagtcaaagcagtttcaaactacaggattccgtttaattttaagtccatataatagcttgccttccctattagccattaatcttgccgggacctcaaaattctaattatgcaactagacattaagaaaatgtaatcacatgagcatgccataatttaaggcgaccctatcaatctgaaaaatcattacctacctcatattttagtttacgttgaatggtgccattgtgaagtttctcattatcctgaaaagaaaagaaaaagccctctatattaaattatagcaagttcacggggcgggggactgattcgattacaagtatttatgggaatggaaatctaaataaacatacttgtcattcaacaatgacaacccttctatataatttacatccccaagataaacatgactctattgatccatctgccatcagagaactgaaacacttactcctaatcttaaaattctaagaataatattaaaaacaagatctccttagggcatttcttaatttgcaggatagaaatgcattgtctttatttcagtatagacttgtcacaaatatgtatcttctaaaagtcaaaattctatttatattttggataatttacaaaataaataactacggaaattggaagtattttggaagaaaacagaagaatgttgcatgtagaattaaaaagtattttagactttataatcacttaaaagttgtcataattacaaaattataaaataaagttactcctgaattcctgaattaatactatttataaactgttacactctgcccaagcaatatttaatatttttttctagaacattccacatctgaattttctcactggaaaacaaaagaccccaccactaccaccaaaaacttatcttcaaggtcatcttgaaagacaaatgggctgagtgtggtggctcacacctgtaatcccagcactttgggaagccgagatgggcagatcacttgaggtcaggagtttgagacaagcctggctaacatggtggtagaaaccctgtttctactaaaaatacaaaaattagccaggtgtggtggcaggcgcctatagtcccagctacttgggaggctgaggcatgagagttgtttgaactgggaggtggaggttgcagtgagccaagatggtgccactgcactccagcttaggtgacagaacaagactcagtctcaaaaaaaaaaaaaaaaaggaaaaaagaaagatgaacgaacttgttacttcgtgttacttggctccttcagcttaccttcatcgtgtctgcagatgtactgcagccttcactaatcacacgatgcaaatcctgaaggcgtctttggacttcttcttcaatgtaagcattgatcctgtaacacaatggagatggagtagatctgacacttctaaccacacaggacattctgagatcctctctttactacgcccttcacaacagggagcaatctccttctaaataccaaacctaacaacaacttgagaacttcaacatttttatttttttcaagaaatctggtgctacatgttcactatctgggttttgcccaaatgaggtagaactgaacaagtaatagaatattgggaatggaaaggagactaagtgatcccatccacgtccttagtggaatgcccgctgcaggatggaagaaaatcagtcactggcttcagaaggctctgcggtctctaatctgatgccaagacagaatatttcattcagagccttgggttcctcatacagaaaaggataatacagatgatagttatttctcacatctcaaggtcatgtatgaggattaccaaaaaagaaaaaaataataagcaagaaatggacatgctctctacaaatcttcctcattcagattgaacagcgtctagcacacttgtattcccggtctgtctcgtctctccaaatgggttctctgtacctggccagcaagaccacatcgtaaaggtctctaccttccaaaatgcctaggacaggcccaaaacagagatgaagccaaacaccactgacttttgaagcagtgtcaacttattatctgatatctcataaaatgtaggtgaagttgtatgaagcaaaactatcagccttgaccacctcagtggattttggtctaatctctggtcattccacctcaatgtttttaggtcattccacctggaggaaacagagagactagagaattttatcttcatcgaaaatctttgtaatggcagagactgcccaaatggaagtcattctgttctagactcccctcctccaattctacaggtactgattagatgcattattattatttttgagacagagtctcgctcttgtctctcagcctggagggctgtggtatgatcttggctcactgcaacctccgcctcctgggttcaagtgagtctcctgcctcagcctcccaggtagctgggattacaggcacccgccaccacacccggctaattttcatatttttagtagagacagggtttcactatgttggtcaggctggtcttgaactcctgacctcaggtgatctgcctggctcggcctctcgaagtgctgggattataggcgtcagccaccatgcccggccggatggattattttaaattaaatggtttccatgtttatatcttatcacattcactaaataaataagtaaatctgcataaacacatgcataatcctgcaatcatttctatactactgaccacagagaaaagattttctaaaatgctaggcaaagagattaaaattttaggtaaaagagcccaaataaagcacaatgtttctgtttcaatattgaaaacaaaattgtgtgctactgaacatgagtgaaggccatttacaatttatcacccctgatagtcacttaaatttgaaagtaaccctgtgagatatgaggctcatgccattctgagtacattttgatatccaaatatatatctcctaatatctagggttcaagactgtccgatttcaaatgctcccatgtttaaatggagtgaagaagggtaatcattgttttcttacaggcaaagaataattaagctgatttttctaagggctctaagccacagagcaatacacaatgccacctaagttgaaaatcacttaactaaagtaacatcagatacagatttattatactcacaatcattctgaatatactagtagtttttataacaaacttcatctatttgtaatccatgacacataaattaactgtcaacacaaggtccttcttcttggtacagttaattctaggtcttcgtttttgtcaacctggccttgcctcactttgtgctggatgagctgctttccctgcaacttttcattccgccctctcactcaaaccacacttgacccttgaacaacacaggtttgaacagcacatgtccacttacatgtcagttttttccaataaatacagctggacctccctattagtggttccacatccacaactatacaaagattgaaaatacatggagggcaactttttctaaccgcaggttccagagggctaacaggtggacttgaggatgtgtggattttgtatcaaagagccatcctgaaaccaatcctctgcagatatcaagggacaactgtacctgcaacaagattccttggatctggctagccaggtctcaagtccttgattttcttgaaatgaccccttaccctaccactggcaggccaatggcagatgaaggcagagcacatctcaagcacgtgtattacttgttgcccttaatagagccctccagatacaaagtagttcaacagagaaacaatgagtccttgagtcacatcaaatgagaagcctggaatcactttcatgtccagtacctggcatccatgaggggaaccaggtgtgatttttcagcactgactggcaagctggaagaagccaccttcccttccagggtcccatgatgatctttttgaacaccatcgacctcataaatcttctgtttcagctgctggatttcatattctaacctacacagataggagccacataattcattcattaatagtatttcccgagcatccttactgtgtgagacattgctttagatagcatgggggaacaagatctgtcctctgtgtgcaaagaactttaccttctagtagaaaaggtgccacatacccataagacaagacataaagtgccatgggccacaagaagggtccaggacgagcactgcaggcatccagaaggtagagtaattttgactaccaagagcaaagatctctccactgtgctccaagcaagtcctagaggtaggtgtataggattctgaggcctctaactgctgcttcaaaaagagttggttgtggactacacatcagggttctggtaaatacttacgtttgatgaaaaagatctatgttttaaagagttttaaaaaccaccaatctaggagaaatttcatagccatggcagttctaagttgagtctccagaggccagtgggaatgttgtcatttggagatgacggcagaagattatctaagtgcagaaagcaatacgagcaatggggcaagggcatgaaaaccaggcatccactttgggctaaggcagagggcatgggaaggggaagcagaaaagacaggcctaggaaagtaggttgagttccatgagaaactaaaataaaccataaaattaacctccagtgataagtgatacatctatatgaggtcaaatgtgtgtaaggtcattctcccaccggcccaggcatacttgaatccagccccatcaggccagagggccaaccttgccagtgaatttggccccaggaagcaggagactgcagtccactcactgtgtgagcttggggaagttatttaaacacgggtctcaatttcttcatggatcaaatgagagcgtcaactaatctccctcaattccttcagctctaaaaatcagagattctggcttcagatgccaacacaccatgatgctgtcaaccctctggtgtcaccagcagcaatttgactgctctatcttgaacatgaaagccaagttctgaattttcagaaatggatcacagggtcatgagggtaagcactcatgggacccacacgaggctgtgcccagtttaactcagccctttctgggtttattgattagcaagtacttctagagcatcaatttgtggaacacacagtattttcaaaagacaagacataagcaaaaaaaaaaaaatgatgtcagaggcctggtggtggccaaataattggggagcaatattaatagggtatcatcaatggccaaaaaaaaaaaaaaatgagctggatgtaggcaggcaattagcaatgtttacagttaagaaaactcctgctggggttgttaagaattgtccttcagcacagggccaatggccagtggaaaagactccacagagcaaagaagggtttgagaggtatcctgaagtctgagtgagatttatatggatggcaagggacaagctggccttcccgtgtggcagatacatggtcagaagactagagggctaagtggatcagagatgggtgatgagattgagatctgacttgcaactctgccactttctaactgtgtgacactcatccccagtggttatacaaccactgcaggcttcagcttcctcatgtgtaaactgtagacgatggcaccctttattggaagagtaaatgacaatgcacacacagcatttaaagcaggatctgaggtacacagagttattcttcatggttttcatcatgactattatcatcgtcattgttaaaggactctgacaagaaaacaggattaagtgtgagtattaacaacttgcctctgttatccctgctatggtgatgggaggtatttctagttgggttacctgatccatgtcaatggggcagctggaatgagcaggtggtaggaaaaaaggcaggaaaatggattaaacctggttcataaagcactgagaaggcaatgggagagccaagttcaggacactgttgtccagtctggtcccacatgaatttaatatttcacacttgtggaattttacgaggggccaagtcaggctgcacggtgaatcctggcttagccgtgagaaccctgggagaaaatgaagcacaacagaaattcccatagaaagctgcgggggtatcgcagtcagagcagagagcccggaatccgtcggcctgaattaggacttagctaagtctatttcatcaaaactcatgaagctaacagccccctttacttggcttctgaaggaacactcccattgtgtaatcacttccgtggaaactgcaatactgtgtctgctattatacagtattaatactaaatggccaggtgacaaaagccaaggacatcaagctaaaagctcatgctgcattcttattgcacactacaggctacaaattgagagtgtgccctccactactttaaagttcctggggctggatctttgtctagcaatttcatttacataacatacctgcaatcatttttttaaacctccaacctatttctctgaaataacagcattagggtttttgattgttattttgttgctgttttgcctgagggaactaccagacagcgatggtaaatgtaatccatagcataagccaatcatttgaatggaggttgtcctgaacttttcaggcaatgtgatgggtgaagctacagtaacacttctgagtaggtcttccttgttatcagcaaccagccccatgcatcagctaaatgccaaggtggggtctcctggccagtacactggacttctgttgaagcccccttaggaggtgctgtgggtggggggagtactgcggagagggcaaggtttcatctctccaatctgagcttcagttaagatctcaactgagcagggagtggtggctcatgactataatcccggcactttaggaggctcaggtgggagaactgcttgaacctaggagtttgagaccagactgggcaacacagggaaaccccatctctaaaaaaataaaatacataaaataaataaataaataaataaatagccaggcatggtagtatgcacctggggtcccagccacttgggtggctggggcaggaggattgcttgagcccaggagtttgaggctgcagtgagctatgatcacactactgcactccagcctggacccagagcaagaccctgtgatctcatccatcctcttcttgtacaagtggtgacactgaggcccagtgatgaaagatcctgcccaaggtaggaacatgctaccatcttgataggaaggggctgaaccaggccataaattcctcttgcaagtctccaaattgggtgatgtttgcatcacccaggtggctgttggcctttctgtgagtcttgccatcaagtcttcaaggctccagaaaaggtgtcctcaaattcacataatatgcattttgagaacttatggtctggtaagtatggtgacagaaaataggtgaaggaagataaatattcttaccttacaagacaagagtgctaatttcctagttttatttttcacaacaacaaaaatactatcagtaaatcaccaaacatgttctaatatcccactgtgttcagaattatctggagttttgtttgttggttcggttgactgttttataatgcagagtcctgaggccttctcttaaatactgtgactcaataggggtgggagaagtattgattttttcattcccaacatgttgcagaaatcagtagcctgtatgcaaaccatgaacccagggatgatacttatttcaacaagtgctggtcatggagaagatgtgaaatcattagtaagaaagggcagggaagtagagatggaaagaggtgagggaggagggaagaaaatagggagagaaggaaagagacagggagcaagtcagagaggggcaaggagggaaggaagaaaggggagggagaggaaagagagagggcaaaggaagagaaaggaggaggaaatagatgcaatggaagggagaggagggaactgaaggggaagaagaaaggggaaagagagggagacaggcaagggagataagaaagaaggagaaatcaaagtggaaactttctagtcttgcatttatcaaaatattaaaacacgcacattccataggacagtgggataatgtacatgggctttgcttttgtttgtgtgtttttcaactctaggctaacaattctaaaagaaggacactaaggagaaatacaagaagtttaggagtacttttctcagttctggcaaatataagcatttgcctatgtattaaagaatatgaaggctaaaagaataagttaaaaaaaaaaaaggataaacacaacatgaggagtgaaaaatgagcactcatttggcacccactgtatgccacacccttccttcccaatctcacctctcctggtccttctccagggcttcctgctcagcctccaggctagcctggagccctgactgctctctgctgccactgttcagactggcaagtttctgcctctgctcttcaatctccatgcccagggtggagtgcctctgcagcgcagaatgtctcctctccagcctggccagggcccgctccagcgcctctctctgctgcttctctctggactccaaaatctccttttcctttttcctcactttttcctcctgacgtgcaatgttggcagtgaattcaaaggtggcttggagcttttgcagctggtttgcattggcctggtactgtgcaagctgttcttctttttcttccatttccttttctacttgataaagagtgttgtctaagctgagagggcctctgtcaagaatttcaaatgctctctgcttttcttccaacagagttggcaagtgattctgcaggaggtactgtagctggcgttctttatattgcagcctgtactccactggctttattttctcgaaatcttgaggcacttccgtgacatctgtgacactctcatcatgtttttccaacaatctagattctttgtcatgttcacattttaaacactctaggatctcctgttcttcttggacttcttttttcaggatgtctttctgctgaaccaggtccttctccaagttcactagcttgacaagctgccttctcttgaattcgaagaaacgcagttgagccttttctaactcctcgccatcttcatcccctccggcacgagcctccttcacccgcaggagggattcccgaatgccttccaggtccctcttctcctcttccacccactgtacctccccacgccgcaggagctggatcatctcctgcttctctcggagctgctcttccagatgggccacgagcatgacctgctccttctcctgctcctctagtctctttttttccagttcaagcttggcatactgttcatctttttccttttggagctggtccagttcttgaaatatctgaaacttctcagccttctcgttgttgttgagttctttgagtcgttggagttcttcttggacgcggagaaaggtctcttcttcttgtctcttcttctgcagctcgatttcctgctgttccctcagcctctcctcttcaaatttttccttctccgcaagtaaatcctttagcttgttctcgatgtggaagctgcggcgtttgaggctctcctcctgcttgcgaatctggagctgcacgatttctgtctccttgcgctgggtctccacctcctgctgcatccgctccagttcagccttgtctgatttctgcttttcctccatttcttctatgagtttcctgaaatgcaaagcactgactggttgttatctggtcattgttcaaatgttgctctaactttactgaaatgttctgaaaatgcacatacaaccaggtcaaagcctccattaaaataaaaaaaagaagagtaactgctttcctttaaatttccagcagcatcctgtttaattttttttattttttaactgtccaacatatcacctgcctattctcctgaagtggcttctgatatcatttctttgtagagcatataatcataatgtgttatgcatgatataattttaaaaggcccctgagctcaaagagaaagaaccatgcccaatttaaattaaatgtgaataactttattcagcccaatgactaaaactcaacagaagttgttacaagacaacattaaataaaaatgcttatgctgtcctcatctcattggggtcaaatatcaaagtcatgataatcgacagttcattgttccagctaaaaaatacatactatttagcatttaatcactagtttgggacaaatggtgatcaccaaatggtccaaaatgttagtttattagtgcataacactgaaaacaactggagcctccattggaatatacaaaatgcataattttgcaggctggtggggaggtgacatgttgtgttttctgttggagaacaaatgatctccactgggtactgtactgaagtttagggttgggatggcctccagaggaagaacacagagttagagcaggaatactgggcttccacctcctgacccaccaaacgtctatcttggatgatgctggaaactaagccagtttatttgtgacatttaaactccaggtcctactaaataaacatttactttgcagattttctatagccttagtttttactctaactctcatctttggtctacgtcttggctggttaaataggacaggaaaaacagaaaaggagaaaatacagttttatcaggtaaagaattatttcagaacatataaagaactgcccaaatcaattaaacagccatttctccctccaccctgcccccccatacacaaaagaaaagtgagcaaagaataagaaaagcaaattatacatggggaaatacaaatggccaaacaatatcaggaaagatgttttaaaagcaggcaggtagaaggaaggcaaattgtcattcttcaggctttttaaaaactcaggggatattattaagagaagatctacttttgattaaatttaaatgaatacattttggtgtattaaatttaattggtgtgttaaatttgcctactgactctatttcccatttctcataaatatttgaagatgaacgtttaaaaaaatttaaacttgaagaaaaaccatctactccaaaaaaaaaaaaaaaagacctgcagtcattagacatgtaaataacagataacagacacagagcaagggggaagtattgaagcagacacagatggaatcagtccaggatattaacacaggaatccagactacaggagtgttgaaacttgaaccccatgtgacttaccttttactttctaatttttcaagttcttcacgctgttgcctctcaaattcaagtctaataaaatcaaatgaaaatgagtcacttttctaaagagcttttctatctctctctcactctctgtatacagagtcacatattaaaaagggcatcagtttttcaagtattacttttaattaccacgggttagcaagtttaaaatgcattctttgctttaggactatgattaggaattagacatacttttgggtacttgaactcaggctgaaaagaacagattttacttgaaggaaaacaaaacaaaaactgtattgaaaaagcagagttaaacaagacttctaaatgataagcacgtctactccatgcagcttagcactgatgagtatataaaaatggagaatctctaccttagacagatgggtccttttatagggaaaagactgccagggaggtggagagagagagagaaagagagagagagcacagacatcaattaaggaaagcatttaataggaaggaatatcaggagaaaagcagtaaggtacttaaaaggcaatagccatgcatgaattgaaacatctttttataaatatcacatttcccaataatttcatgaaacaaacactccaaaaagttagctctgttatgttttacacttctcacacttctctacacttctcatcataatcatagaaaataactgagtaccaataataaatataaacagtagtcaaactagcacctttactactttatagatagttatactgcatgtaggttcatcaagttcctgctgtaattaatggttatacagtataggagttatgggggttgtgagattgtgaacagattcatagtggtggtacaataaagtgatttaggtcattgggaattttaaaacaactcactaaaataataacacaagctgatttcttatcaaatactatatttaattatcgcaaagtttcactattcttattaagcagcagaaactgtatttctttttaattttttttcagggttgggatcggagttgggtcagacactgccagctacctccccccaccccaccacccttgaactatataattcttaagcttatacatttttctgttgcggtagagggcagatacagctaaaaagcttggctacagaaaagtcaccataaatcttcttcctcgaataatgtgcaaaatcctgattggaaacaattacttagtcatgagtgaacaaacttcaaatagttctctttccaatttaataatgtggagtaatattgagaataagatgtctggtggatttcgttttggtattgttttttgagtcagggtcttgctttgacttccaggttggagtgcagtggtgtgatcatggctcgttgcagccttgacctcctaggctcaagcaatcctcctctctgtttcctgagcagctgggaccacagtatggtggcttttttaggcagaactgagtatctcttacatggcaggtgctgtgtggcatgatttacacataacctccctctgtccacccagcaaattctaaaggtggcaaacagtatctccattttacacacaaggaatccaaaagtttggatatgttgaacaccttctccaaggtcacagtggtaataggtggtggagccaggatgtgaactcatggcagtctgcttccaaaataccgtctattaactcagtttatgagcaatgttcaaatttgtgatattaaagtattaaatatttcattgaaacctgttagatagcaatatatttattctactgacaaatggaaataatctgtaccttatgcatgagaaatcagccatataaatctaaatgaaaagcatttgccagtcatgaaggccagcccatatgcaattgcattaagtagtcctaggacttcattaaaattaaaatatgatcatttctttttatttaagaataaacagaaccttaggaaggattccaagttggtatcttcatacttcagtagagtttagtctttctagagatatttacatagtcaaaaagaatcattggataaaatactttttaaaatctgagaatttccctaatggaatgatctgtactcttcatttttattttctgtgaacaagagctcagtgtgcccatcagtagagctggctttgacagtgtcacgtgtgcacagccacaaatgctacactgagcactgggcattcggatggaaacctaccatctgaggattgtttctagaaacaggttttgtgtttgacagtcggcatgccctccgtcacttgttcttccagccttagaaagcatatttcttatcccttttgacaaagcaggaaactgaggcttagagtacataagcagcagaggcaggacttgaattcaagtttggtaatgaaatctctgctgccaaccactacaactgttgctactagtgagctgcaaggtctcaaggaggtaatcagttctgagttttaatatctaaagtgacattttaactgagcacctactttttaaaaattgaacacagtgtcacgaactgtgctaggcaagaggctacaacagtctgtaagagagatgtggtccctgtccccaccaggctcccggtctgtaagtgacagtcagtgtgtcacacatgagcatggggtactgaccccagaatttggtagtacctaggatcaaggcaagcttcctgaagaagcatatatctaatctgagtcattctttctcttgcatgatatagaaactcaaggaaagctaataaaatcagctttgggcttgctataggagaggtggcaagacatgaagctcaagaggacaacagaagctggacagtgaagagccttggatgttatgttaatgactctgaacttgatcttaaaggaggtggcagaaaaatgtcttgggccagggctgttgaagaacacatactcttggtgttttgtagaaaatagatgggtgggggagcaatatgagaaggcagagacaagttagtggtagcaacttaagcaggagatggcagagcaggacccatgacaactgtttgccttgatcctaggtactaccaaattctgggctcagaaccccatgctcatgtgtgacacactgactgtcacttactgatcaggagcttggtggggacagggaccacatttctcttacagactgttgcagcctcttgcctagcacagtacctgacactgtgctcaatttttaaaaagtaggtgctcagttggccaggcacggtggctcacacctgtaatcccaacactttgggaggctgaggcaggcggatcacctgaagtcagaagtttgagaccaacctggccaacacggtgaaaccccgtctctactaaaaatacaaaaattagccaggcgtggtggtgggcacctgtaatcccagctactcgggaggctgaggcaggagaatggcttgaacccaggaggtggaggttgcagtgagctgaaatcttgccactctactccagactgggggacaagagcgtaactctgtctcaaaaaaaaaaaaaagtaggtactcagttaaaatgtcacattagatattaaaactcagaaatgtattatcctggtgagaggataaagaagtgaagctctctcctgacactcagcaggttgaactgacaaaacttggcaactggtggcattttggtaggggtggtaaagagaaagaaaaagtcaaagatgaccctcgggtttctgtccaagtcctataggggggcaggaaggcagaacataactacaaagagactgagcccagagatcagcaggtctgaatacaaattctagtgttctgagaccatgaacaagttatttaaccttggatgcttcattgctgtaaaggctgaagaatgtaacaggccccacctcaaagggctgtagccaggatcaagtgagacacgacaagtaagatgcctgcctggcacctggacacatcgagggctgagtgttgcctcgcattgctgtggttcactgagatgagaagagcagtggggaaggaggggcctggggagtggcagctgtagcagtgctggtgctcaaggtgggagaggccagggcagtggttgacactcaccaaagctaacaaccacgggggactcactccatacctggcactgttctaggtactgtgaatttaattctcacaatgaccctgtgaggtcactgttcccatttcacacatgagaaatggcaatgttactagtaactggcagaatcaggtttgattctagagcccacaattttaatctcttctctgtcctgctttcaagctaagctcagttttacacttatagaatccaatgtttacaaagggtcatccaactgagacgtccagcaggcagcacgaaacattcaacgagctggtatgcaggcccttatcaaggctgaaggtatggacttggccttcactggcatgttgacaagaactgaagccccaagagtgggtgaggttacccaggacacacgtgtagaaggagaataaaggagcttgctgcaaagtcagaaagattacagacttcacagtgacgggcagagataaatggccctctaatgaggctgggagtgagcagttagagactcagagaaaaatctggaaagggcagagggaagagggtatctaaagaaagagaaagagatcagtagcatggaataacccaggaatgccaagtaaaatgcagagcccaaggagcacccaatgaccttcatgacgtggaggttcatcttggagagacctttgctgggctggggctggggctggactgcagaggtctgatgagtgagtgagaggaacctggagatggtgaatgtaaatacagtagagcgctttcttggtaggtttagttgtaaaggggaggtggtggttttgggagaatgggtgctcattttaacagatgaaatagacttgtgcctatttaaatccttgtatcaacaagcaggagacagagagattgagtgaaaaaatgggaagaggctgggaatatctgatagacagagaggtctctgagcgggcaggaaaggaaagggtagcgccatagctgagagcaagggttcaggcatgggtgcagcccagaccaaattctggctcctatatgaccaagggacaatctctcaaccttcctacacctcaattacctcatctgaacacaggctcaaaaataatcctagtcctcagtgggtgagaggatccaatgagggtactcacaaccactgttaacttagttaataaatactagctattaatcctatagcatccatagtacaggtaggggcagttagtctgagaaaggcaaaaggggagttttttcattgggacaggaagaagaagaaaaggatgaatgcaaagcagacatgggattcaaaggtgttgctctcttaggactcctgtgttctatatggagtcaggaacaagctcctctgcctaatgactcctcttcataagagtgaggagaaataatagcagggttagaagtaaaagagtcaggaacattatttgtaataatgaaggggccggtgggcaagagaactgatggaggaaatgagcagaaagggctggctgggcatcattcaagcttagagactattaatttacaggggcactgatctctgtgttgatgtggttttctcggttgcactgagcttagatgtctaggtataggcttagggtggggagatagctcaatggttctagaatcaatgagactcacataagtggaagaacagaaggatcatctgatgatctgggaagtggatggctcaagtgctggagatgagggacttaattggatagggaagtaagtggcgacaagacaaggcttacaggaaaagaaatcaaagaaagtctccatgctgaagaagggagtgctatttaagtaactagattgcaagatgagttagtttcaaagaatcactgaagataacatcacgacttagaatgatgaaaggcttagaaggaaatgtctggaaggggaggagaaggcaactgtacggacagtcaaagagtgcgaaaggcaaaaagtgggacaggcagcggtcccaagtgaggctcataagtgctccagcaggcagaggaagggtggtctggagcagcttggaggaggatctaagagtctctggattggtgaaatcataggtcctcctcaggcgaagccttcactttagagtgtctgattgggatggagaaggggaagtacgtgtattaagggaagttgtcaagatcaggcgcttgaggctgttgctctggcctctgaaggtagtactgtaaagtactgagtcagaaatcagagagagattctcattttaattcttaatgaagacttgtgattttctttctgtgaccagtctctaaataggtagaaactttggttgttttctactgaaagcaaaatgcctttagtaaataatgatacctgtttcctcaaaaataagagtaacatttaaaagacaaacaaaaaatgccgtaaagatgtttggtcttaaatcacaaacagtatgaggggagagtcattccaaagttagagagatttttagatatgcagtgatatgagttgctgctcacactggatcatttctgttaaatattacatatttactaatcatactccaaaatgcacctatttccataatcaatgataattatttgggatagtaaaactcagtagaatgtaaaatataaatgtgagtgtgtcattatcaaggagagaacatcaagaataattgtatttgaaggtggctttattttaaatatgtgtaattcattatcttactttactggaattatcatggccccccattctaatttcccaaatgttataattaaaaggaaaccacaaagaatgtaatttttgcaggtgtttttaacatttttaaatgacacttggaagtatacttactgtgttaagtccaacaaaaaaagcatagcatacaacctatttttttttttaaatcagagatagccttttcttttacattaaaagagatctaccatttttaggtataactgcacatacttcaattaatcttcctgttatcatcggcaataaaaaaatgagggggtgggaatttctcagcttataccataaagaaggagggagggagaaagaagggaggagagagaagtgaggaagatttaaatgaactgaaagcataaatacctgcatccttgtgtgtcttcatggtgattcgtgttgtacctatgatgtcgtttcagtttctaaacagagtatgactgcccaggtccagtcaatgcttgagcaggcagctgcagtgcgggtagatagggagggtaacggaagctgagtccagcccacaacatgcacggaagggagaccccctggcaacagaggcggtctccctatgggacagtcatattggtaaagttcctggcatggatattactctattatctcagtgggcacatgatcagacaaggaaaaacttcttggtcaatgcgtaggcctggctttttcctaggtgacttttaggctactgtcaaatatagggattacttcatgggcatgtgacccatgcagctgcacagggccctgtgctcagacaggtcccatatttgattctctgctgtggccatcttgaaattcttaatgatattagaacaagaggcccaactttcaatatgtactgaactctgcaaattatgcagctagttctgatcaagcatatgtcatctttgaaagaactcctggccttttgcctggaatgctcggtagtattcctcagtccagagaaccagaaaaggactagaactcaatggacggtgtttcacctttccctgatgcttcactagggtttagttccgactacagagggttcttcaatggtttagacaaaaaatgattgaccttttcaccacactaccatcccctaggaaacttcagccttctcaagcacctcacaactgagcaaatcccatggagactaggggatcttaaagactaaagagaatgtttgaatttgggtgaaggggtttgtgcttgtcctatccaatcttcttcctagccttgtgaacctaacattctagatgttccttgaaggctaagcagaaagcagttatttcacccagggtaggctctgggagactgatgaaaagaagaacccagccatccatcaggtttccagctcttcatggaaaggccttgaagtctttcctgtgtgaattagctctcaggtaaactttcattagaaaggtaggaatagctgttttgtagagacaattagaatttctacactactcactcccactcacccttttttcaaatcattgtcagggtatcccacagtaggcggacttacataaaattacaattcgaggggtgtgtatcaagatgggggtgggatacaagaagtctcacaatgcaatttattctagaaggttgtgaaattaaaccctcttaagtaaacgtcagagtttataacttaaaaattcaaaacactctgggaatggttttctaataaatttccaaattgctggtctagaaggtactcactaaagactttccaaggagccagtcttaagccttttgcattgcaaatggaaagtgccctaagaaaaaaggattggttttttaaaaaataataaaatttgatatcataagcattttcactaagtttctccccggcctatttctcatagcaatggtataacttgctctgaaaatgacagctaggaccatagatgtgaaacccagaggctttcctaatcaagccagaggatcacaggcagtctgactggatagacacttgaaatagatcatacaatgaactcgtacacaccccacctcccctgcccctccatcctattttacaggccagaagaatgaggcccatagagtgtgagagagagggcccaggtgaactccttttaagagtctggactcaagcccacctcttccaactcctcatccattcttctacccaggctggaattctatctcaccttctcaaccaaaccatggtactttttataccagaaggagcctctcaaaagttaaaaatgatccatcattacaaaatatacctcttcccattggacaaaccagaagaatgcaccacataattttcctcccacttccttcagccatgcattctacatatacaacaaaacttgtcctggcacctgctgtgaacaggcaggactctgagtagaataaagaatggacagcgtgcctttggatactcttaagtgagtgaaacagagtgaaagaaaacatgctcatatatcgatcacacagaatgtaaggagcccagtgggaaagggcatgttttcaacaggagacggggtggagggacagcatttatagggatgagaggaagccttgcagaggaggtgttgtctgagcttggccttgaaaaacggatagaattgtgatgagcatagtgtgggtgggggaagatccagtggaagaaaaacagaaggaagacaaatgagaggtacacagaggaagctatacagagcctcagctggctactgctctgattaaataaagggaagtgatgagaaataacagggaagttagactgtgagcagaatattaaaggtccagatgacacactctcgagggcaccttcctgggcaagcttctcttctgcctcccctgcccatgagtcctctatcacagcacggggcaggacattcaggaactggtggttcactcgcccataattcacctggtcaacatgccaggcactatcctaggcactgtggtctcagcaaaagaaatcaagtctcttccctcataaacctctataccagtgtggggttgagctaactaatacataatgcgtatgccgtgagataagtactatgaaaaagcataaagctggggaagaggaaggactgagaagaggacattcaggacagagctgcatgaaggaagggagtggccatgaagatgcatctggtgccaacatgagggatgagccaggccacaggccaggaggggatgtgtgcaggacaatggaagtacagaaggaccacatggtgccagcaggagaagaaaccaagggagggtggccacaagagaagaatcatggcccaagagggagctagggtggacaccactcagggcctttcaggtcacagagggcagaggttgtctccccctccactggggttttcagaggacagagatccccacctggctgaccatgtatcctgagggctttctgtaaggcacagagtaggtttcaaccggtgatttctatgggtagtgttttgaagacagtggcatgagcttcacagccagaaacacaatgacaaggagttacagaccacctgagtgaggagatggtgtcaaccgatgtccatctctttgccgtaagaaataacttttaataccctgcatgctctcatgtttacaataattcactgcaaaaaatttagaaagcacaggtaagtgtcctacaccatgactcctttattttgttcccagccctcagcctttccggccatacagatgcactcacagagaagagcctaccagagagtctattatttaatcatttcctcataatatacaccttggacaaatcagcaaatcattaactattattctacaacatagtttaatatcatgggattctataacatagatgcaccatgatttatgtacacaattttatattgttggaaatgtacatgggaaattatcctgaaaaaccattttggtgacgtctatagtgggtggcccaagaaggggctggtttaaggaaagaaacactgtgcacatttgtgggtagagggaacagagaacagagaagggaaacttgaagatgcaaaagagattcataaaaggcaccgcagttcctctgccatgacgatacactgttgaagtgaagagctttgcaagtccacctgacacatgtgtacgcctctgagatcgcacatgtgaaagacaacatgccgatacgcctaaccaggcaatgctgaaaatgtgcgcctctgtatcccagaccagggctgccagaggtctcagagcaccagcctgtctgccatgctcagctctctgttgcagtgcattttcttttctaggtctccaacccagtggtatagtccttccttcccttatttctctccctgacatttccctccttattcctccccaagttgctttaatttaagcagcagttgccatcaaagaaagaattctgggcgtggatttagctgacaaaataacaaagcagaccaagatttatataaagattaattgaaatgttatcaacaatttacatggaaaaaaaaggaaatagttctgagtgtctttaatgattagtcaaaagttaaatcaataatgatataaacataaaatgaagaatcatattcaacggcgtgagaaaaagcacacaattaaatgtttaaaaaaagtagaaactgtatatctagtgcaatctcaattctgttttttaaatactctatataatgcataattacaatatctgatgtacacttaaatatatgtacttaaaatataagcaaatattacaaatataaaccaatcatgttttcttggtgaaaagattatgaatacttgtgattactttattcatttctgaatgtgttactttttataataagcatttcactttataatgggagtaactacctatttaaaataattttttcaatctacactggttatagcaattgttttacttctgctttgcttctatcaatctgtggttcatttcaatttatttccaacaatgatgacaattaaccttaggtcatgagatacgggagttgctggtgatggttaaacatacggtgtcactgacttggaagccagccattgcaggttaagagtcatggtctgtgataaaaggagggtatggaagttccttatctggaaacagttcacacatacacacattcagtcaagaattattcccttaaacacctacttagaagttggaatacagtactgaaaaaaccagactcttccacttaccactaaatacagagaccaagagtagacagttgtacaaacagatataatcaccaactacttaaagtgctaacaagaaaagatagaggatgctatgaataagtagcccaggaggtaaaatttggactgagtttggtaaatcctctttgaggaagtgacatttacatggagattttggagacaatgtaggatttggtcatgtgaagagccggtggacaaatggacaagtgttctagaaggagagaatagcatatgcaaagatccagaagcaaaaatgaatgtgtacaactggaaaccttgactgaattagcaacatgttctaatcaaatgagttaacaaattacagagccggtgacacgtaatcaagttaatatgttactgccaaggaaaatcatgctaccatgtaggactaggaggaaacctactttctcccaccattgcctgtaactgccattcatcatttcaccagaacagtctcatttgctcagctgaccttgacaattcagttttagattgtgtggttataaaatggctgaagcaaaatgcatcccaccactcagacaatacaatctgaagtaactgaataaagacagattgttctttgaatttaagagctcatctccccacctactttgaaaacagaaaacacccgaagctcatcagttaaagtggctcacagtggaataatattcacggacaaaaaggaaaaaagcaagtctccaattaacactaatctcagttaatggaggaagaagcccacttctttcagttgctttcatcacatgttccccaagattgtgtatcttaacaagctatttaaggcaatctatagccaactgtaaagttagtaaatggtccataaaaacgcaagacaactgagaccaaaaactggagaagaaaccagccttgcagcaaactaaacttttgaaaaatggtaaggcccaataaaataaaccagtagagataaacacagtaaataaccatcaactaaaacacaggctaactaccaagttaccagcaacataaatactgccaactccatgtataaaaagtccatgctcaaggtgagcaagaaaaaaaaaaggataagacaaattataaagtagcagcgagtgagtgagaagagaaaagtgtgcttgcaagggaatgtggtcttcttccctcccaggacacgcagtggggaccatgacctcacatgaaggtgcaaaccttgttgagaatatctccagctaccagcagattctgtttctgaagccctttctacattgttagaaagcaaaggggaaaagtgcattccccttagttcatgtttattagacgtctaagttccaggtatgctgctgtgcactgagtaaacaacaaactagattctatgtctgttttctggaagtgtacagtcgtggacagcaaagctaaggctcagtacaacaaagggcatacccctgtcatcggtgtcttcttactctctccctaatgtgatgtattcatcctcccagtttagtcaaggcagaaaggagatgaggaaggggagaggaggggagaggagggaagaggaggggaggggaggggagaggaggagaggggaggagaggggaggccaagggaggggaggggaggggaggagaggggaggccaagggaggggaggggaggagaggggaggccaagggaggggaggggaggggaggagaggggaggccaagggaggggaggggaggagaggggaggccaagggagaagatatgaaagaaatagggaaggagtgggacacagggaggaaaacaaaactatttcctttcatataaatgttgtcatctggggagaagccctcactatctccttggtgcctttggcttttggtattcaaatcccagaactctacatttggaatctagttctttcaagctttacattccagaaatccatttccattcttaatctgaaagcaccaggaaggcggatgctaatctcatagagcattctagtacagcaagtagctcagcacagaactaattaggagcttggtgagtctttggtgatgaccaggatggccaggacttgcttttagagacagccactgttagccagattccctagactctagggcctgtgaatacagcctagaactgtgtctaggagggtgtaattatatcgacacattcaacactctaaggaggcccattttcagcttgaaaaaataaataaataaaaaggatagtctcatctatcagtgggaatgatggtgatatatgtataaacaatctgtaaaataatttgtgaacatgcatcgagagccttaaaactatatgtactctggcctggcaattctacagctacttcctccccgctgaggaattaatcatgagaaaatgcaaagattcagctacaaagctcttcagcccaataacttgtgatagttaaaaaacagacaacaaaatgcctaccactagacgttaaataaggtacggcaggggtacccagtccccaggctgcggactggtaccagcattcgatttgcataggagcgcaaaccctatcatgaactccacacacaagggatctaggttgcgcgctccttatgagactcacctaattatctgaggtggaagagtttgatcccgaaaccatccatccccctcctctgtccctgtctctgaaaaaactgtcttccacgaaacttggtccatggtgccaaaaaggctggggagcactgaggtatggaatagtcatacaatggaatatcatatggacattaaaataatgtaaaaaaatttatgaaagaaaaaataataagtgcaaagaactctaaagtccaatattaatccatcttggtaaaagatataaaatataaatatatatatataaatgtgtgtacatatataaatgtgtgtgtacatctacacacagagagggagaggcagagacagagagatggacagtggaagaaacagaggtatgggctagaaggtatggtaacatgttaactgtagtcgctttttttttttttttttgcttatgatttctaaatttcccataatgaacacattaaagtaaaaaatacatttaagtatcactcattcgtcttcttccccgattgtcggtgacttcagaccaacctctgagttaggggccttccgtggctgctgggtctgcactagccctgatgctaaccaaaccccctcaggctgctgcactccttgggatgatgctccttcaatggctcaccagaaacaggtttaatcctgatttttgatattctaactgggtttgaaagctagaatttaattattcaaatacatccatctaaatgggctcactactggttagtgctcagaggaggctaatgtgccagtgaaaaattcttttattttcaagactgaaatgagcttggaagttatctaattttgctttgagcactttcaagaagctgtgaaagcctctgcatcttgccaaattagctgcctgtttgcagtctcaaagcaaggcagaggaggcttgagcagtcggcttggtttcttcttaaagacgctgcaccagctgaggaggaatgtttcccctgcaggaaaattatctcctggcaaagaccctggctgggcacctctccaatgtggaactaactcccaaaggaagtcaccaggcttctctgcctaatccaaaaattctctggcaccaagtatcacgcatgtgtgcgtacaaatcatggcttccagagagtttgaggtgtgggccagcagtaatttcccaaactatgttccaactctatgtgcccagttaggctgatacaatgttcttggggaacaagaactttgcttttaaaactgcaaatcttactataattcagaccacagggtattttttagacatgggctgtttagaaaattagtagatggcctgctgaacagacaaaaatcacattgctctgaggataacttggagcttactggatacaataatttgcaaaccagtcattcttttggagagctttgttctgggaaaaactgagtactatgcagcaatttttcagtcaattgcaaaaacatactcatgtctacacaataccaaagaaaccaagaggtatggtaattgtaatgccaccaaacttgtagaaacacatctgtgtgggtgagagactcacaaagataggggccaagtaatgtggagatagaaaacagcacacagggaccactgacaaaagacctgggcagacctgtgagagggcagacgcatcctttgtgctgagagcacatgtgctggccaaaacctacagctcaatgaatatttgtgaggtgcccactctgtggggtcttctggagattcagagataaatgaagcatagtgcctgccctcaagaagcctacatcaattaaatacacaaacatcaaatgaacaaatttggaaagagctaagatacaggaatgcacaaaatgcctgcgagaggatacacgggaagcacttagctccaactggaaatgcacagaaagcttcctgaggatacgactctatgctcagctcaaaagaggaagaggactggccaagggaagaagagggggaaggcgtcacagacagtattacagatgcagaggcctggagaaaggtgtgacccatgtaaatcacaggataaagttccgagtggagagtgactgaaaataacattggagaacaaagtcagagatgatcaggttgagttgatgcttggaagtcaccacctggtaggtactgaggggccaggccagaagctgagaagaggaggagggggtgaccaggaagggctaaggaggtgtggtgagctccttcctcaggttcatggcagggacaggactccagggacaggcccacaagtcttccctgtgccatcagatagagaaagtcaggaatcacagtggtaaccatgccaatcggagctctgcaacatttgctgctcctcatgtactgaccacattgtccatttaaggaaaaaaaatctgtcctacatgttctttggtagtgatggacgacaagatttcccagagtgaaagatccctatatacttgctgaaggtgggggcaacaagaggaagagtgctaggaggacaaagtactcatgtagagccaattgcggaaggaaaaaaattcccaagggatagagtgggtgatgactgttatcaaccgacaggaaagcaggcggcttcacagggacctgggcaagggaggggagtcccagcattgctaggcagaagccagcatgagggcttagcacagaggaggaggccaggaggcgtgtttgtgtttgtgtatactggggcgggcagggaagcaaacatttaatagacacctgctttgtattacacaacaattaagagggtcagcccctagtttggcctaagagggggaaagtaataaagagcagaagaaagctctgaaacaagtttgtttgagtaggaggtgccatcaatgcttttgattcctgttaaaactggttctggagaggtgatgaggcaaatatggggttaagggtctccagactccgcacttctcagcagggcttggtcacctgctgaagctacaagactgctcacagggcttggtgactatgtaggtaccctaggaggtgacttacaatgagatgcaatgcattgggagcacaggtctggggtgacatgtgtggctttccctaatttaaagatcttcaaactcatccaagtctggcatgtgaaaagataatactaccaccgtcctgatttctaacaggctttacaagtgtcttccctgttcactaaatcatgctctgagatgactgagcctcggtctgtctcaatcactcaagccccagcacagggctggacaaatgatgggccctcaagcaccactgaatgaatgatgtaaaacggcagggctgtgaacatctattttattcaacagggggatttgccttcatcttccaagtggagaaatatcacctgtgacaggccacacaaacccgagcttttcccatggggtgtctgatcgttgacggagtcatagtcacttacaggagaaagttcaaggcccagggcctagtttttcaaggttgtactcattatcctcccttcctcttgacaacctgctcctcttcctcccatatttctgtttcagctgggtggcaagcagcacccaaccagttactgaagccagaaactggaagtcaacatcttttccttcattacatcccatatccaattcattatccaaacctcatgacttcctgccctgactgtctctgtagctcacccttctaggttcctcccactgctgcctcagttcaggccctcacctctaggatccttgtgagcttctccagggcttgtgctgcccagccaatttctgagaggtcagagcaatgcctttcaatgcaaggatgaatgaccatgctgctccttggctacaggcactccttggactgactgggttttgagaaacatgcaaatgagctagttgaactgaacttggcagaacatgagagaggtcatgtaatcatcaggaaatccatccaggttagatttacattcatcatttatttgctatacttaccaggggaactacattttgagattttctttctatatttttaaacaccattttcaacaatggacactcttgagaaaatagaagaagaaaataaagatgaaaagaatacaataagatactgcctcacacacattttgatgtgtactataaaaacagaaaatcacaagtgctgatgaggatatggagaaactggaacccttgtgccctgttggtgggaatgcaaaatggtgcagctgttgtggaaaatagcatagcagttccttgaaaattaaaaatagggctgccatatgatccagcaattctacttctgggtacatactcacaagagttgaaaacaaggactcaaacaaacaagttggacacccatgttcatagcagcattattcacaatagccaaaaggtgaaaacaatcaaagagtccatcaacagatgaatggataaacaaaatgtggtatatccgtaaaatggaatattatttggccacaaaaagaaaggaagttctgacacatgctatatggtggatgaacatgaaccaaagacattatgctaagtgaaataagccagtgagaagaggacacaccagtgattctacttaagtggttaaactcatggagacaaaagttgtgtgctgattgtcaggagtttgggggaaggagggaatggaagttatatttaatgagtacagagttttagtttggcaagacgaaactggttgcacagtaatgtcaatgcacttcacactactgaactgtacacttaaaagtcattaccatggggaagaatgttaactgaagatttggccctggaaacccacccctcaggcaactaaaattgatgggcaattactttctacagcaggtggcaagttgcaggggcctgggaaccagagagaaagtatgatgaagtattaaataatttttatttgaatttgtgtcaatgaataatgcaaggggtagcagagagaaaatgtgtacttgaagtcaggtcaacaggctgcataatggtagcgtcagatgcatccagaaccactgtaattcagtctaaaacagattgcttctcccgaattctctgattgccttggcctagttcttcatttcaagatgaggccctcttcccacctatggcttaaagatcctgaacatgattttgagattattcaagtaactgcagcatcccctgggacttgcagtatcccctgggattaggcagacagattaggccacaaaaccacattcctctgcataatatgtctcattccagtatttggaacatccacgcccaaagaaattttaaaagcctttcccaaagggactcaggtgtcttactaaaattttattcttaatctgtttacagaatttttattaagcatgttatgtgaatgacaccttatacagaaaagaataacacaaggcccctgaccttaaaaagcttccattctaataggaagtatacataagcagagttcttactcgactgctagcccaggcctgtcctccctgtctcccccatctcagggaagagtgtaccacctgcagcagctgtttaaacctgaatcctgggagttactcttaattccttgattctactttgctccacttctatggctaaagtgcagatccaagccactattacctttcacttggattaaggaaatagctttctaaatggtcttctgcttctatgccacattctccaaatggcatacatcctgatatttgtattaagtacatcttcaggttactctcttgcttaaatcattctagtggtttgccagctctcttaaaaaacagtcaaaccccttccaattgccagcacggccctacattagctggcccttgacctcccctccctcacttgtaccactcttcttcttgcttactatatcccatctactctggccctctcttcacttctcattttgatgccatcacacttgctttccccttcagtctcaatgctttccattctccccctttctgttttatgagtgtcattttctctccatacaagtcttagaccaaacatcccttcttcaggaagccattcctgatcactccatcaaacactgtcctaagacatttgatttcatttcattttcacttcctggatttatttttaaattatctgttgactgtgtctctcctccaacaagcatgcaagctgaccttctcaggattactggcaatggtgcccccgtcctagaatcctgactggttcataggaggcattcagagaggatttgttgacagatgaatatatgttacaaagaagacaaaataaggaggaaagaaatggagcaatgtacagtgaagaagggacattgatttttggttgtggggaagaaagtcaggaatagcatccacagcagagtttgtctgtactatgccctggaggacgagtaggtagccaggcaaaaatgcatcccaggctctggaactagcaaaggaaagccccagaggcacaggctagtccacatgtgactgagcaataaaacaacagcagaaaactggagctcagaacacctggagagaggtccagagatgagcacagacagtggacagcccgagtgacatggtgcaggctgggactttattttttagaccatggaaagtcactgaaaagttctgaggatgaaaactagtaactttgacctgcattttgtaaacactgaggaaaactatttgaacttaaaaactaaaaacaaaaaatggcattacttttaagagaactacactttctcctgttttagggagaaaaaagaaagacttccatctcacgtatatatgtaaggcaaagaggggcccatggctagtgaccctgtgctcaaaggaaaggctgagtgaagatagcgttttggttttcaaagccattgaatagccatattacattagcaaatggcttcacattaaaaggtaccaccactgtggaggataataacgatagtacctggattccaggattaactaactgggtcctgggccaggagacaaaaccaagccagcactcttcatatcacagacaatttaactagacaaacaatatttaacggatgggatcacactattttagctgaaattacactaaagatctgtgtattatattaaacttaaacattagtgattccatcttggtcacaataaaaggcaactgctaaaactactgtaaggaattaaagacctacaacaaaacgtgcctctgaagtacttaccatttagttgctctgagaatgttctcccatttcagaggtctgattgatatggcttatttcaggacagaattatttaatgagcacaactttcctcaatgaccatgtaacaaaatggaaagaccaaataggaaagacaaaggctgacacaagggagtcaactgctggtgcttccagaaatcctggaaagcgggggtgggggcgcccaggagtccacagccacagtgctgtactacatggctttttttcttaagttcaggcaggtgttggatttgggcttcagcttgctggcccataaaatgaggaatccagaaatgtgatcaaagatccctcctatgacactgaagaaattccttgtaggtatctgctttccacaaaccagaacactggcttgggctgaaggagtgaatggctttcagcacacagcttgatgtttgtgagaaatcccagggttgggggtgagggagcaatggaaaatggaaccagtcccccaactgcaggaggtgacagagtcaaagcatgagtgatggaatcagatagacctggatgcatgcttcagctctgactatgaaactgacggagagcaaatgtataaatatttccccacatgtaaaatgggaataggtttgtgagaattaaaagatcacggattcaaggtgcttaacatagtgcctggcatatagtaactactaaataaatgacagttctagaaaatgttgttcttgttacttcacttgttcagccatttgatttacctccattattttacatgagattatcctggtaggaaagataaaattatggaacctctcacaaccgaaaagggccctcaaagttccctgtttttaggcattttcattatcactgtcattttattgatgaagcactaaggacatgagttaagctgactgtccaaggtcacccagccactaagtcaatttaaaacactctcatttgtgctctcagcagtcccctagtgttcgaagtagtgaagataatttcctgctccattggatggcctaagaatcaggctgcctctgttataatttataaaacgagataaaagtgcgtaagccaaagggatcatgcactaagtaatcaaagtgccaactctaaaatattagacagttatgaaaatgataatgaagcttgtaacaacactcacgaatgcttattatgctgttaagcaaaaaatcagaaaatgcaaaactgtttatgttgtgattataactaagtaaaattatgcacatatatagtaagggctggaaaggaactcggaaaatgacggtggctgatttgataaggaggcgccgttgcagaagttttatttttaccttgtgactataatggagttggcacaataaatgcaaaagtgatcatcacagggaaggagatgctgctgttcactcacccggggttatacaacatgactgcagacaggttctcacgggacttcgagaggtcggtcatggacaagctgaaggaggacagaaggccactctaagggcagacacagggcagagtggttaccttagcagagaagaaaaggccactgctctggactcattgcttccaacatgtgagagacaatgaggtgcacatgctcctaattaacacgcaccacaattaactggtctatctgaggaaagcagatcatgggcagtaaggccctgatacatttcaaacccgagccttctcctaagtacagcaggaccttggccttctagggctggggaaattcatcaggaattccacaacccagttggtctcccctgccggttaaagtcaaggaaaggggtcacaatatctttgccatcctccattacctggcaggcagcaatctcctataatcagcgatattccctcacacttagaacgataaagaagaaggcaggaggggtgaagggagaccaaaagtaagagcttgacctattttgcttccaagggaagctattggcaaacatgttttttccctctgttcctctgaaactgtgtaccaaaaacgaccctctagggagaccctgggctagagcagataagaggctccactggccggaaaaagccacccaggagaaggctgaggtttgcagctttcttgctattttccaattagggcactggcaacctcgggcatcccttataaaggagacagaaatgagagtctgggtaaccagtggtcaagggcaaacacttctggtattcaagtcagtactgcagccaaagctccccatttgccggctacagaacaagttagggagagttgctcttggtctgtttctcatcttgacctgggggtgatagcatgggggtattaacggctgctgcacagataaagagatagaatatatgtacaagtttagcaccattcctggctcgtagaaatgttagctgtagcctttattattttcttcagtctaaggaccagccacgatgtccctgaacagatttctttctttctttctctggtccttagctccttccccatcagcacttaaacgtcctgccctttagacgtccccttccaaccaaaccaaagtctttcccagttgtcctaaacccacccctgctctcgcttcccacctcaatgaaaaatctgtttactgtggctgattttggattaatgtgattccaatgttgggttaattcctaacagatgctgattagaggaagtcactctccacctaatgcaaaatgatgcccagttccttggtgggaagggtggaaggctgaagagaaggatctaggaggagcagtttctccctgtctgctctagaatttacttgcttgctctcttacttcatcagccaatcatctgctgggaaacaatctccctagaatcaatccagatcacagaactacttttccacggttctgcaccccagaaagtcaaaagattggaaccagagtgaccaccacccactcatcctcacatacgatcagtggttccctcctagagacgccgtgtccctcaccttcctcttctccctgagcttggcggcttcctttggatggttaaagcgaaacatattggttcttcccaagagaatcacagcacctgaaaacacacaaaaacagtaatgaatttacagtaagcagtctggtcagttgccaataccataacatggaattctactgttgaaatgtaatttccagtgtattataaaataataagggaaagctttagtctcaaaagtctgcttacttaagacaatttcaaatctggaaatacctttatttttacagctgagtgtcacaacacacattatatcctcatatccataatatccagcagaagtgatgaatctaagcattacaacatattatgagatttaaaacttaacagacatataattagacttttgattgtctggaagaaaaaaggaaaccagttctccaaagagatataatatcaagcaaagcatatggtcacaactttaggaatgtttattgatactggtaaaagtagaaatctcaaaagaaaagtgctttcaaaagaaaacgtatggaattggcataatataggtaactattactaaaatctccctcagaatttgacgggagagaacttgtgtacatttatggtctatttccaaataaaaacactgcttcttctcaaaaccctattaaaattccacattagacccataagaaagggtccttttgactgatgacagtcttccttattcagaaaacaactgcacaaggggcaaaataattcaagggaaatgcccaaggaaaacaaaagcatgggaagaggcaaatttcagcttgatgaagcaaacaaacccattttagggtcacagctgtctaaagcgggcacaggtgcctgcagggctgtgagctccttgtcaccagaggcatgtaagagaaaagatgttgcagaagaggttcactgtgtcttctgaagtcccatccatgtatgagaggccacgtgtatggtcccatccacgtatgagagtctacaatgcctcagggcatcaatgaagataagacacatgcactgacagtcaaccatgaagaatgacaggtgagtgcttaagtgtctagcacacttagctgagtgtgtgattaagtgacgagtggagcctggagtagctggggacaggcttctgcaccaaggacctaagttgggtctcaccggataaccagagggcaagaggaagtgttccatgttgggtaattgcagagagagtctaagctatagaaaggagaatggcctgctatgctcaggacagaggagagaatcatgtccatccaaagttcaggatgtttgaaacagcatcaagaatcaatactggatagatgaaatagcctgtgaagaccggagaacaagtatgagagtttagaccagaggtcacaaactggtggccagaggaaaaactccagtctatagatgtatttttttgtgttccctgtcatgtttcaaaaacaaaatctttagttggcaagagttcaaagtctggagagttcacataaaagtctgggtacttttctagcattccttcaaaattcctaagatatgctatcagtagatctttgtttgcacttagcaaaaatccctgggctgctgagagttgcctcctttgcacaggtgacctctggttgaccacagtcactagcctcttgcttgggtaatatcttcacctgggccctgcaggaaatatcataataccagatatctattctggagctcaggccagcatatccacctgcctatttgatgtattgttttggacaactcaagggagtttcaaattcaatatgattaaaacctaacaggtttaaataacaacgacagggagcaactgatatgggttggttttagtggttgtcattatttagcagaaacaaagtcactatgaaaaggaggataagacagtttaggagccctagtggggcagcagcagatattatccactctacaatttgcttatccctgtcatgcagaattgcatttgtattttttccaattatggcaagaccattaccatgataaaaaaggtgtttcccatgccttttacgactaggactacatagtaagccaaaagctaagcagccacgtctaggatgtatgtatatttaatgctgttaaagttacattagagattaataaagcaatcacattccaggtgttaattacatctccaattcttctttttttctgttaatcaaatgcccagtcatgcaagttgaaaattgctaaaatatgttaatggaaaaatagaatggtatttcagagacatatttcaaattgtattaaatcattgaaaataatcttgccacccatgttatctgcatgaaatacacacaaaaagccctgtaaggagttataaaagaaagcaaaactatcatgacaattcagtgcttccatctagataatgtttgagtcaactgtctggcatgttaaaaggggtccattaaggctggtttccttccctttcttcttctaagcacctgtactcaacaaatctcgtgaatttaaaaatttgcttcatttttacatgatgccactgttcattcagcaaatatttaatgaacacttactgtatgccagtcactgtgataaacatgggggatacagagttgagcaattcagacatacgctttgcctttatggagctttaaaaaatgtcagagagagagataaataatcaaataatgaaatgattccacaaataaatgcaaagctgcagctgaaggagaagaactgtgtcctgggctcaaagagcaacaatgataagggtttattataggggaaactagagaaggatatcttcaagggaggtggtgtctaaaacaagctctgagaacaagttgggagagtgtcttgcataaaagcaataatgatcatgatgatgattgatgataataatgaggaggaagatgccaccaagaatgagtgactggaagacaaccatgtggctatggcaaagggaacaagagtgagcactgcaccaacataaggcttgagaaggagggagaaagtgaatcaactcaaatgtttcaggatgtaaaggatcttgtgttttatctagttgtaagaggaagacactgaagggctctgtgcagcagcataacatgattagatttcagtttcaccaaagatcattcttgcaatggtgactgaagaaaggccaaacagggcaagagtgaatatggctaagcaagccaggtggctactacagtggtccaggtaagtgatgatggctctggactgggggaaagggttaccaaagcagagaagtaaaacaaaactggaagatatgtaggagataaaatcaatatgatttgatgatgggctagacacaaagaggagacgggggtgaggaagatggcttctgggttctggaatgcatcactagttgaatggggagtcttctgcacagactgagaacactggaaaaggaccaagatggggtggggaaaaatcatgagtttggttttggacataatgaattagagatgcatttggcaaatgaaaatatgggtttgaagctcttgaataaaagtctgggatgtcgatctaccttcctacccacttacctacatatatatatatatatatatacatatatatatatatatatatatgtaggtacatatatatatgtaggtacatatatatatgtaggtacatatatatatgttggtacatatatatatatgtaggtacatatatatatatgtaggtacatatatatatatgtaggtacatatatatatgtaggtacatatatatatgtaggtacatatacatatatgtaggtacatatatatatgtaggtacatatacatatatgtaggtacatatacatgtaggtacatatacatatatgtaggtacatatatatatgtcggtgtacatatatatatatgtaggtacgtacctacatatatatgtgtgtgtgtgtgtgtgtgtatatgtgtgtgtgtatgtgtgtgtatatatatatagagagagagacatatacatacacacacatatacaggttgactatcccttagccaaaatgcttgggacaaaaagggttttggagttctgattattttttggatttcagaatactggaatatatataatgagatatcttggaaatgggacccaagtctaaacatgaaatttatttatgcttcatatacacttatagagagtcctgaaagtaactttatacaatattttaaataattttgtgaatgaaacaaagttagtgtacagggaacaatcagaaagcaaaggtgccactatctgagccacccatgtggacaatctgcagttgcttagcatcaccatcattcctgattctgaattatatgctgctgataagcaatcacctggtgatccatgtctttttgttagcataatgaacaagtaggaaattcactccttgaactgaaaacagggaggatgcaagcttttgcttatcacagcaattttacatttacgcatgcctgctgcattagcacatctcagcacagttattctgtccttggcacccttagttcctgtaggggctgcctcattgtctgcagtcagtgtctttctagagcaataatgccaaaacggtgatgtttcatcagcattacagacttggttctggtgtcagattttcatcaccgatgaccttgacatactcgtcaataaatttctctgctgcttcatagtaagcagatactttatcaccacaaatctttaaaatgtaatgctgtgtctgttcctaaatgtctgcaaccagcctgctgaatattcacagtttccttcaatttttggttcattgtgatagatttttgcttgttttcatgatcagcttcccattaagtggcaagtattcactgtgacactgatgggatccactcttttaatacacaattgagatcttcacttttagctttatgctgtgtttttctatttttcatttatgtgtatttattactttgagcatagaacttagccttctgtttcttcaggtcatatatgatggccacttcaacactatactcttctgtaagacatttcacacttaacaccaccatcctgtttctctaacagctttaccttctgtgccacagatcaacataaatggttcctgtgtttcttatcactgttgtccacaggagtagctgcagacctttctgacatgttcaaacattatctttacagcacagagcagagaataagtaagaaaaaaaaacccacagtgagtaatgcatgcaggtcttggacctgcgcagggtatcatggggaacatactattgtcatgtgtggcctgaacatctgccatttttttgtcctttgtgggcatactcgtatggggaatctggacatgtgccgaaaagatacactgaagctgaaggggactaggggggcctcttttcctttgtggatattgaacaaactgtgtgtgtggtggacctaagttttgattgcgaccccatcacatgaggttaggtgtggagttttccacttgtggtgttatgctggccctcaaaaacttttggacatttcggatttctgatgaggaatgttcaacgtgtgtgtgtgtgtgtgtgtgtgtgtgtgtgtgtgtgtgtgtgactcattgctaataaatgaaactataggagtaggaaagaaacctgagacaaaatacagaggtagaagacaagaggacctaacattgggcacctgaaggaatgctgacttctaatggccaagtagaagaaaataaacttacagaggaaacagagaagagaccatgagagagggagaaagaaaccctccaaagccaaggaaaagaggggccaacaatgcagaatgcttctcagaggtcaactgagacaaaaagactagaaaacaccattgggtgtggtggcatagaggtcacaagtggtgttagtgggagctgatttggtagtagaccgaggccagaaggaagagactgaggaatgcagaagaggtaaggaaatgcagatgtactgggcacaggcaactctttcaagaagtctatgaatgaagagaaagagttggtagtagccagaggggatgatagtgtattagtccattctcatactgccaataaagatatacccaagactgggtaatttataaagtaaagagatgtaactgactcacagttcagcatagctgaagagacctcagaaaacttaataatcaaggtggaaggggaagcaaacatgtcctctttacatggcagcaagaagtgccgcataaaaatggggaaagccccttataataccatcagatctcgtgagaactcaccatcacaagaacagcagaatgggggtaaccacccccatgattcaactatctcccaccagttccctcccatgacatgtggggattatgggaactacaattccagatgaaatttgggtggggacacggccaaaccatatcagatagatcctgcaggatattttattttttgttaaaacttatatgtatacttaaaatgcaataagcaaactgaagggcataaagaggaataaatgaataaaagaactaatgaatgagaatggctgataatgtagtttcttgatgaaacctgaagagtgtgtgcttcccagaaatctcggtgtggttaaggacaagtcagtgcttaatctctccagaattcagtttcctcatctagttatcaaactggacaatttctaagattccttccagatcttaaattcttgtcaaccatgaaccatttggtctgaggtcagtgtgattaacagcagcagatggactttatgtgatgcacttaatttgtaattttgcaagcatttctaaacctccttgaaataatgacttctttgagattaattcagagtttgctaaatacccaaagacagacaaattccagagagtcttcagaggggatggaggggacatgacattgtgaaagcatagacaaagacattgctggtttcacatgagactctctattctaatatttcaagtaagctgacagaagtaaatctgcaaacgtttctagtgattcctaaggaatgcagggacaataatcattaatatcaccaataattaccctcttcaagttttatgagattttctaattctgctactgcacaaataaaacaactcattttttctcctactgttttcatatgaatatttctgaggtaataatgtaccaattatttcattttgggttacaaatactacaaacatatgagacaactgtgttcccacaagtgtgtggttcacactttagaggctgtggtgtcaataaaaatgagaggccctttgtaattctgtttcgagactcctagttctacattttactttagaaacaccccctgccccccaccaaccaaaacataccccccgccctccaccaaccaacacacacacataggatgcaatgcactgtgaaagcaagctcagtggaagaaaggttatcattttagatgtgacaggtggagaaaccaaactctgtcaggaacatacaattttctgaaatggtattgagtgagaggctgaactgaggtagggcaggtaaagttcttatttcattgcctgattgaagcaaaaagaaacttgcttgtgtgtgacattttccttctgatttaaaatatcttaaagatatttatttatattaaaataagttatgatgatgataccatttagggaaactgataagaaaacatctaatttccactaatacatgccaatacttaagaacagattaagtaatatgttctagggccttagacttggtgacacagattttattatttcaaacacgagaattatagtactttttctctatatcaaaaatggctttaggaagctagataggaaaagatgaagatggaacatggtgtctgtggtgggtaagaaaatttcacataaatactaaacaaattcaagcaggacatatggcttggtgttaatggctggcttgcgaatgaatgacaggcactctgcaacaaaggcagcaggcatcagtatcacatcatgccatcagatcatcagttagtaattctgaagaataaacatgaaatgataccttatcaaaaagctacgttgaccttgtcccttctttttcaatgtttacaattcaaatatggatttacaatttcctgctttagataaatcacttcaacctctgtttacccttagtaaagtaaaaattggaaacttagattctgggactctgtagaagaaagaaaattgattttcaatcttggctactgaagtttccagccaaattatccatcaagaatgatttgcccaactgtgtgcacaaactgagtttgaagctttgtaaaatttcgagatgctccagtcccatacccaaagacatttttagatgtgtgtgtcggagcagggagagggggtggtaagtgggagctgatatttttcttaacacctcatgcgagaaacaaaaagagcacagacatccccaacttaagacggttctacttacaattcttcaactttatgatggtgcaagagtgatacacattcagtacagtattcaacaaattacatgaaatattcaacacttgattataaactaggctttgcgttagatgattttgcccagtgttctgagcatatttaaggtaggatagactaagctgtgatgctcaataggttaggtgtattaaatgcatcttcaacttaggatattttcagtttacaatggatttatcaggacacagcctcattgtaattcaaggaatatctgtatatggaataggtctgtccttctgcaggaaaatgtagaaagcacaggaaatgattagagggcaattcaagacagtgtatagtcacatgataaattccaaagtactgaagggaaagcattacacaattggtcaagctattagtaactttctttccattcttgcccagtagtccacattctttgctaccaacttcttattcactattagtaatcatctcaattatttatttctaggctcatacgcactccacagtgtcaatatcctattgttccttccgaaatagttcttgcacaatgcctcccttccttcagctcccaaagtcttttaccttcaaccccttttcctcacggctcttctatcagcctccctttgagctaaacaaaagctgcatcatcttcacctctcagcccacattacccatctactgagtggtcagcacagacttccttctgctttccacagaaaattcatgcaactgatctagaacttaagagccctacagacctgcccatgactcagactcaacagcgttgatctcactactccttctcctccctccatcccctttccagtcttagacatttcttcactacacactttggctgaagagcatctaagtcactttttcactatatgccattaagacaaatacattcacttcagaattcaactttgggtacattcccccttttcagcagtctaaaccaccctctgggaggagttttggttctgcataagctgaaacaagcacactccaccctgtttctcctaaggaatgtagctatagcctgaacaaaatgcatgtagtagttatttgagggccttgggaagtaaagagtagctgttgcagttctctaataaccagtgatattaggcttttattcatatgtttcttgactacatgtatgtcttcttttgagaagtgtttattcatgtcctttgctcactttttaatgtttattttttcttgtaaatttgcttaagttccttgtagattctggacattagacctttgtcagatgaatagattaccaaaattttctcccattctgtaggttgtctgtttgctctgattatattttcttttgctgtgcagaagctctttagtttaattagatctcacttgtcaatttttgcttttgttgcaactgcttttggcaatttcttcataaaaatctttgcccatgcctatgtcctgaatggtattgcctacactttcttctaagggttttatagtttgggttttacatttaagtctttaatccatcttgagttaatttttgtataaggtgtaaggaaggggtccagtttcaattttctgcatatggctagccagttctctgagccattattctcagcaaactaacacaggaacagaaaaccaaacaccacatgttctcacttgtaagtgggagctgaacaatgagaacacatggacacagggaggggaacaccacacactggggcctgttgtgggagggtggggtgcggagaccatcaggaaaaatagctaatgcatgccattaatacctaggtgatgggttgataggtgcagcaaaccaccatggcacacgtttacatatgtaacaaacctgcacatcctgcatatgtaccccagaactttaaaaaaaaaaaaaacagagtagcaggtggattgaagaaaaccaagattggaagcaccactgaactaacagtgaatttaccattttttgcctgcagtgcttcccagcttggtctaggaagaaagccaaaagtggacaagtgcaaaagagagaactccaggagaagccccctagttcaggttggaggaggagcagagagtcccttagcagcaacagtgggcccatgaggaaagggaatctttctttcccatcagaggagctgtagtcccccaagaaggtggggcagatccctgttgctttattccttccctgtcctctcatttcttggccgtagacacggagacaggcatatgaaagagtagaataaataaagctcaagatttccagggaagggaagacccgagggaggcagaaagtgcaggagagatgaagagggaaatatgcaggaaagcaacctcacagagttgtttattaactcctgggctcacccctatgtgtgtacacgtggatctgatcctcagaagaatgctaagactttgagaactgaactaagcgacagaccactgcacaggtcccagcctggccaacgggtagtacacccactgctactggaggagcactgcaaaggatctgaacactgaagcagcagtggaacggcagacacgatctgcaaaagctgatggtaacttatggcctacatccagctaggtaaactgtctgctgaaacaaagggtataaacatttcccataggatttaaacaagacccaggatctcataatatccaaaatgtctatgacacaatccaatattattcctcagcacagaaagaaccaggaaaatcccaacatgcattgcaaaaaacaatcaacaaatgtttatactgagataacaaaaagctccaataaatgtttcaatactcttgaaataagtggaaaaataaaaatttcaacaaagataagatataaagaagaatccaatattacaagtgaaaaacaaaatattcaaaataaaaaactcattggtaggctcaaaggcagaatggagatgacaaaaaaagtcagtgaacttaaacacaggtcaactgaaatgatccaatctgaaaagcaaagaaaaaagaatttatcaaaaaataaaaataggtaaacagagcctcaaggaactgtgagacaatagtaaaatatctaacttttgtgtaattgtagtcgcagaaggagaggggaaagagtatagtgcgggggaaaaaaaaattaacaaataatggttgaaaacttcccaaatccagaggaagacaacagcctatgaatttgagaagctcggcaaaacccaaacaggttaaccccgagaaatccatgccaaggcatattgtaaagccaatgtactgaatgtaaagctgaaaatgaagttttaaaaggagaagagagatcaagaaaaatagatgtgatgagtgaaaaaaagagaaaaaaaggggttaaacagaatgacaaatatatgtctcatgtccagaagtctggtgcaccaagaaactaactccagtataattagctttggccacttgttctcatattcaaacacatgagaagtcaaattctaagccatcaaactgactgaacagaccccctcttggccatggggaccccacagaaaccttggaaatcgagttcctggacatgacacgataggaggtaggacatgctttcttatactccctcctttgctaactgccacggctttcattcctcaaggttcaacagaaaccagcccattggaaagacttgtttcactgctgacttcaaccaactgtcactgcccctaccttctgtggtttccacacaatggaccagcattgcctcctgataagaaaccatcgaccatggagtggttctggccaatctacagggtgcacagtgaatgtttccatgtcctctgcttcaactcttgacatcagaggaccaaaaactctatccttgcatcatgctaaccctgccagtttttgttcacgcaactcatgtagaggcataagctcaactgtgcatgctcatgtttctccactcataaatattcatgacttctcctatagcttattaaacatgcacattcagccacccagctcagcataaattcctgttccctttccccctccctcaatgtgtctgcttctggcttccagctggaggctacacttcccagcctgtcagaatggccaccctgcaggccttataaaaaataaagctctcctttccaaatttacaaaccttgtcattcttcagttgacatgtgcatcagaatcacagacataaaaaacccgactgcagggcctgatccctagatttgctggttcagtaggtctaggtggagcctgggaatttgcatatctaacaagttctcaggtaatgctgatgttgatgacatactttgaggaccactagctttaggtatagtctgttaagaagagttagggctttgacattgaaaaatagttgttgaatcagcccatatacaagtgacagatgtcatatttgcaggtctctaatctgaggaagacatatgatgaatgcttagggtcaagtgcaggtgagtcagtgaaggaacagacactgatacctgctgacacataaaaggcctcctctgttaacgggataccttggctaaaccactgggagatctatttccctttctagttccactaaaattcttttttaatttgtcagcgaacaactcacagcagccctccagcagatgaaaattttatcaaagtctcctcagctccactctgcagacaatcatctgttccctctgagtacttgaatagatgaaaatatattttggcactcaagcataacacattcaaatgtgcccaagtataaatttcccagatgccaattctgtagcacttctaaaagaagagatgaatagtcaatggatctgacaaacaagtaagaccaaaggagtccacttatgtgaatggaaaaattaattgcatttaacaactatcagctttaaaataacatattacagtcaaaagaaaaaataataattaaaataagagagaatagctcctagaagttataggacaaatgctgaaatactgtttcaattacaatgcatctgactgttgtatcatttcatattaagtatataaaacagaaaaaagaaaaaaatctaaggtctaagccactaccaagaggagctcaagttttatggactagtattatgatcaaattcacattttcttcttggtaaaattcacactttcttgaagaactggctcttctttctttggaatcatcctatagaatcacagtgtggaatgaggagaactaagctttggagaatacaccaattgaagagcatgttagatataatgttacatatcccatcactatttctggaagaactaaaaaaagaggagaaaaacttcaggcaacaaactttatatatgtcatcacaattaatgctcacagtagcagcaaagccttttcttttgagtgaagacactaacagatgaaaatatttcctatggtttaaggtggggaaacagtttatgcaatctgacataagtgaggcagttaactgatacagaaatagaatttgccctcaatgttgacaatctgctaaatttagataaatctccgattagttggcattcacatatatggtaagtaatttagataaggaagtggtaattactaccagtgttttttaatgggacagcctaaataacacatttacaaatgaacagaaatttactaatgaaaagagacatctgaataccaaatatcagcaataaactggaaaggggtggtggaaaggtaggaagctgctggtagtgtaaggtggaccaggaatccagtcaattgtggagttaatatggctaggaatcattgtgacttgagttaccacgcagccgcagtctctcttcttgacatcttttacttctataaaaggaaaatgctgcttgggtctgcctcaaaaggtttgtttgtttgtttgtttgttttttgatctaatcaatgggccaaatacagtgaggtccattctgaggaccaagacacaatgagtcaggaagggtcctaggccaataaccactccaattaaccagaaactgggatgaggacagtaaatgtgggaaaccaggattacctggactttaggatcctagggctgcaggtatgacctaacctggcttagagagctaacgagatgaaatagcacacacattaagttataattatttaagtttcagagaaataatgcatgaattcgagcacgaatgataatgaatggtctgctgtaattatttttggacaggggtcatgggtgagggctaggggatgaagggctgatccaatatggtaagcatatagctacctaagacccatttccaagagacttggctgtcatctgttaattcaaatttgactttgtagaaattaactaagtgaaggcagaactatgcagaagtgtgctaaaaaatttacttaaaaactgttttatgggtaaaagccaagacagatttcaaagaataaaaatgctactatatttaatgctgttccccatttattatattttaatgacgttcatatgctgtttttttcctttagctttttgttttcttacagatacagttgaaaatccttttgtagctccacctgatataaccccctccttcttctccagtgggtaaacactattctgatataagaatgtatctgtctcattcatgactcttttatttttactacatattttcataaccagaaacactacatcacatcattttgtgttttaaaaacatgttccatttcccattttaataatccacaaacatcacgaaaagttaagtaaagaattctaatccttaatttctgaaggactatagactttttttctttaatgagatcttttggtcttaaagtatgtgtaattaaaagaaaagttatcaccttgcttttttgtacaatgcattgaaacaaagtcatctcgcattttactgccctaagacatgctaatgacatttacattcactgcacagcgttttaacaccttcaaacatagtatttttatgttaatttcattaacagtgatactgagaaagctgttcagtagcacagcagaatgccagaggaactcaagcccatcagatctgaagatcatggcaccatgctaataaaacaattaagagcatcccgcagggaaagacaattccgacaattaaccttcaatgccaattagtaccagtactgtccgaggaaaagtcgtatcttcaatatgaagataaaaaatttggttcctaacctgaatcattaaccagaataggcatattatttaaatgaactctcagtttaggtaaaagtttaagatcaaaaaccacttaataaaaatactgcgtgggagatacattatttatataccatgcctcaattcacaagacaattagagaggtaatcatcgctatataaacaatttcttctaactaactaaataagcaaataagctttccttaaggcggtggggaaggtagaaggataaccccaaaattaaattttaagttctagacagtgtccgtgtgtgtgctctaaaagttccttttgtctttttggtgtttggaattcagtactgattttctcacagaaaaagcattacatgctagcttctcagcaaatccacaagagactattttacctataacacggcaggaacattgctggtcaatgtaatctactcagcatcaagtggccagggctatgggtggtgggagctccaggagctccagagaagagtgactgtggcagagaactattccaaaatagttcaaaggtggggggcaacaaagccaggtggatccagcagccagtatggatgtttgggggctatttgtgatttaagaactacttatactaaataattcccccaaagtaatctcagttctatacaactataatgtgtttggaatttgtatacataaatgaacacagttcaacaaatgtatacattaaaaactttcaaagttttactgaaagaaatagatgataattcaaacacaagagggatattgcataagaagttccaagatggaaacatatttttccaaatgcaaacaaatcaaacaaaattagaatctaactcctcaaattacattttagcacaacaaaactatcctaatatttaaagaaaaaatttctttaaaaagttaataagcacacatagtaaaaagacactccaatgaaaatagagattaaaacatattataaaataataaacatcaaaactgtgtgatactgcttcaaaagtgaaaacatggagtactggaacaacaggagggccaagaaatagatataatgctgtatgtgttttcattttaggtaaagcaagtttcttcaaaagggaggtgggtataagcagggaaaggttataataaatggcataccaatatgaggaagaaaaaagttggagctacactttataaaccaatgaacccaggtgtattaaacaaatatttcaaaaaaatcctgaaaaataaaataattaatcacaaggaaaataaaaacaaatgttgactagttctgtggcagagtttaaaattaccaaagaaaacacaaagaacaacagattaaagcacatgaaaagttcattttaaaagtaacaaaattacatttaaatagaaaatactacaagagtgacacaataactaaatcaaatatgagaaagcacttacaaggagttatgttatatggtgtgtacactcaatcaggggaaaacacatgttttacttcccacgattctgggaggcaatagtgaccttgttctactcatgtattaataatgattttgaaaaccagtacaagcctcttgtaaaaatcctgtaacaataaacaaagtgattataacaaggttacttccttctgacctaactgaaggagatgcagccagtacatggatctctactgtgtacgttcctctctccctgggaaaagaggacagtccgtcatcataactctgtaccagcctgtaccagcctctgctgcctggaggaatagcagcaggacctctatctgaggttcccacagagaacagacagttgatgtgactacagtctagactccatacaggattcactgaaggggttgtcagtgaatcgtgttttaactgtgtatcttcccattactcctgctgtcagcactagagcctgtgagttcccaagcagggactgccactgaagagccctacatggtgacctctcatctgccaaccaattatggtcacttcctgggctaaaggcagagacagcctcccaccatgactaatactgctgcctggaaataacctgcccctccattctacattgctagagcccttgtcccactgcaaaaaagcaggaaatgctgcatttgtaataatcactgagggatcactgagtgctcactgctttgggttggtcatctacaattgctgacctttgatcttcctggccagctccagggtactcagatatttcccctgctcaacttacctttataaaattgaaaaaacagatggagagatgaatgggtgggtggatggatgtggatgggtacccaggttggcgctccatcgcagctgatgttagagcgtctttgacggacattatgcacctcctccaaaagcataatgtccctggtccatgctatgtttccttcatttctgaggtaccttcctgcaattgacttctgcttacaaacttggctaaccctgaataaactacatgctttccagcccccatctctccaattcctatgtcacaacagactcaattatacagtgtgcaaccattaaaaactgtaattataaagactacgtataacatacaaaaaggggcttaaacatgccaatgtctttctttccctcattcttacatagttcagcccaaaaactattacgcaggcaaaagcaaagtaggcatcagcatgagagtggaggcaaatggcatgggctgagaaaagtttctgcactgtggaagggtgagggccatgacagccaagcatagccatgcttgtggtctgagcaagaagaggagggtcccagtgtgaggagggggcaggaataacagtatatgggttacataatggaagccaggttcatcactgtcagaaaaaggagctaggaataagtgagaaaactacaattaaccctatggtattgggttgggattagaagtattagtgtattggtataaactccttgttagcaatataggtactgaaatacagatatttcacaataccaatataaacagatatagaagtacagttgtaaaggttgtacacaaacacacacacgttttcctagctctgttcacagaaagcatatggaagcagtgacactccagtagcaatgaacacacctggttgctaaataccattctgtactaaaaggaaccatggctccttggagaattggttagtttgaggaaagcacaagatgagtctggaatatcttgtgtcagaaagtaacgaagtgtttacagaacagtgaggacaggacacgaaagccagcttgaagaaactcacagtggccaaaatataggacaatttgatattgaaataaataatgataaaaaacagaccaaaacctagtaaataaaatcgcaagctgtgtgaccctttaaatagataaatgacaagaagagaaagttcttacaatgaaaatccaattaataagtgtagaaataatgatgcattcttttttaatcaccatttggcaaccatcataataataattaattcagccaaaaagaaaaaagaatggattcctaaaaccagtgggtgaaagtggtaatattccataatggaatggaaaatttacaatatcaaagtaccttcaatctcatagtactttcccacatacttactaataacaaagaagaaaagagtaactccccagtggggaggcctggcagctgcaccttagttggatgatcaaagtgaacatcatcagtcacgggacaaatggaaatcgtgtaatgagatatgagaaaaacagcatcatttctctgatattcttgccaaaaatgcatattagtctaatcataagggaacatagtcaactctcacacttctataaagaatacctgagactatgtaatttatggagaaaagaggtttaattgactcccacttccacaggcttaccaggcagcatgactgagaggcctcaggaaacttacagtcacggcagaaggcaaagaggaagcaaggcatgtcttctcatggagacaggagagggggcaggagggaaatgccacacacttttaaatcatcagctctcacaagaactcactcactatcacgagaacagcaagggggaaatccacccacatgatccaatcacctcccaccaggtccctcctccaatattgggaattacaattcaacatgagatttgggtggggacacagagccaaaacatatcaacagatgaatcctacatttatgtagagggacattctacaacatatctgacctactattttcaaaactgccaaagtcagaaaagtctctctttgggtggggacacagagccaaaccatatcaacaggtgaatcctacacttatgtagagggacattctacaacatatctgacctactgttttcaaaactgccaaagtcataaaagtctaggaaaggccaaggaaaagttccagtctgaaaaagaagagagagaggtaacaaccaaatgccatacaggaaatagaactaaatatgggacccacaaagaacactgctgggacaaatggcaagacttgaacgaggtctgaggatccgatggtagaaatgtatcagtgttagtgtcctaatgtagatgtcagtgtttaaaggaaatacacaatgaagtattcaaggacggcagggcactatttactttccaataattttgaaatttaaaagttcttggtactattcttgcaacttgtctatgatattgaagttatttcaaaacaaaaaatagacatgataccaaatcctctatgtatgttacaattatatctattaagatgaatataaataatagaaataaaattattaaaagaaaccattgtgttaaggttttgcatttgaggggtactttttaaattaaaaaattcctttaacatctcatctccataacaacaacttttaagataattctatatatgttcatatttaattaaacaagacaatgggtattataaaataagccctccagccaaacagaagagaaacagcctattgaagcaaacagtctcaccctttttatacctaatcaataattaattctaagatgcacatgttcccccattgcctagccaacttgttttctcaaacaatatatacaaagacctgtgaaaattaaaaccagataccttgatttagatgtgtggcctccacgatctgaacaccattcacagagcactgggacccactcaggggtatcagagtcactgtccccccgatattttcaaagatgcaatgctcactctccaagtcaaggccatgaagaactaaagtggaaaaacaaagtagaaagaatttttcccccttttctactgcaatgattcccagctatttatctataaatttatttattttccttttgaatactcttccttttccacataagtatcatgaagtgaacatttatgtttagtgagaaaaccgaacttcaggagctcatgacgttcaatgataggactggaagatccttagaatgttcttcaagggatctggacattacctgtgtaagaaaatcagttctgggatgttaactcatttcatctttggggagaaaacagtcgagtaacttgttttaactgaataccatggagttgccctgtttgatactgaataaatttcctccatcagccacccagaggccacagagaataaaagcaaaagtgctccatgggtcgaggacttactgagacctctgcactgacagacactgcactccaggagcagaaacccaaggtgaacttggcatgacatgaatcttgaaaagcccaagaggccttcagaagccatactgagatgcctgttgcctgagcctgtgtcaattctgagacctctcagggcatgcagctgctaaagtttatctattcatgtataactctcctagattcttgtttgaagaatggtcaaacacagatatgaacacctgtcaaataagcctacatgattttaggcacagttcttggctagcgtcttgggagtacaagccaactagtttccactgtctctacaaaattgcactactgatctctgatcacagaaaacgtgtgttcttaccatcatttatagctaccccaaagatcaaacacataatttaacaattagaagaagaggcctgatgcctacttctacccaaacataggtgaatctggggacttctagaaaatggtttttatctctctcagtctcacaataaatagtaaatattaggttggtgcaaaagtaactgtggtttttgccattactgttgcaccaacctaatacatgtaggaacatactaggattggctccattaatagcttacacttggcaagcaggttcattgccagcaattctaaaagcagctgagacaatataattcttcccctgccaatccctatcttgccacacacatatacacacccaccaccaccaccaccagttgcctaagttatgctcttaaagcctgtaaggacctcatctgtgtaggctaagtcactgattatttgcgtgtcttgtgaagactttcaggaaacctaaaaagccatgcttccacatgtgtgtatgctgtgttttctcctactttctgttgtcatctttgtgaagacagtgcctacaaccctctccttcaaaagacctacatcttttatctgtgtctgttggtatatttccatcaatcattgttccattgtgagacaatgtagagtgatttaagtaactgtgttcctcaaagacctgacaaggaatggaatgtagggtgggagaaagggtttattggcccactttattcaccaaattagttgttctgcattattcatttgagttgtattctaaattacaaaaatatatatacacacatatatatacgtacatactgaccaacactgtacttgaaaaataatttaattttctataattacttcaatgtcagtcattcgaaaaagttcttccttgaatacaaccttaaaaaatcattgggaacagatcactgataaatatgctcaccaatatcttgctccgtggaagcatcgtctctaccaacgtatgtctgaccttcctgggaagaaaacccaagcaaaatgtattagtaagaagagaaggaatagcttgtttcttcatttttcattgaagcccaaacaacatagtggccaatgggatgaacaacatcctggcaggccacagcttcaatgcatcgagagctccccaaggctctgtaaaaaagccccagttgtctggaaaggtttaatgtacagcaatggtgaggccctgctttgacagcgttaaatactttgctcatgacaggaatatcactgatgttcctgatcctttctggggaggttctccagtggccaagagattctttgtgtctaaagatatagtttatgtaagtctgcaaaacacaaatgcagtagcattctcattgttaagttatgggtcagagagagggcactaaagtcaaggttacaggggcatccattaatactgatgtggaattctgtactcccaagatgaactgtctgcttggaaccaagcccaataatgcaggtgagaagcacaattttataattgccaccagggaccaggaaactgtacatacaacaaaatccccccagctgtttacaacttttctccttcagtctgtgtgcctttttgttccttacctccctcttactaatcctacagaatagagggcaaatcaatggctcatcatttaactttagataacaagggaactttaaataccaaagaatcccaatgagcttctgaaaattcccaaagggctcaaggatttgttgtatattctttaatttaatttagttgtgttcatgaccatagaatattataataaacctagttagtgtctaatggagaaactggaaacaaaattagaatgttccacttaatcagtttctacctttaaatgatataagatgattccagtactcaaaaggtcatcatcgatgccaatcaaatgaggcagttcagaatccaaaacaactccaatcccttctttcctgagggctagagtttgttcctgaaattaagaggaaaagaaaaagaaaaggttactttgggaaaagagaacttcaaattaggtgttcttcagattgtcagaatgggcaatattttatttctcatctaaaaaactgcaagaaaaatggaccttaaacttcgtgttgaaatcctggcaggtaataagcaaagtgaacttggaacttataaaaagcgaaatataaaacgaattaaactcattgcctgatacataacctcttcaaagcaaatcttccttcagaaaggttctaggaacatccaaactacaaagtaaactttctcactcttcagagcctttatgccatttaatatcaagatgttgccttagttgatggcttttctctctacttaccatggttgaactgtgcatggtcctgagaagaagccttcctgtgcattacttaccttgcaccagaggaacctggtcctctgcctcctgtgccatcaacttctcctatccactggatcattccctgctatacattaatatgaatctgctattcacctcccatccccaaaccccaccacgtcttttggccttgcctctccttatagctaccaccaatttctctgtgccttttagagaaaactacctccaaaaagttccctatactttcagttcttcaattccttccctcttactctctcttgaactccctctatgaaggttattgtctttgggactcttctttaccgacactgactctcctgatggtctccttctgtctcttgacttgacctgccatctagatgctgatgactctcaaattgcatctccagggcagatgtctcccttaagtcccatactcaaatgtataccgcatatatgagtatactgtgtgtgtgtatgtatatatatatatatatgtacaccaacccaactcagtttagctatggagatgtcaaacaggcagcacaaatttaacacattaaaaaaaacaaaaaacaaaaaacaaaacaaacaaaaaaaaccttgattctctctgcctcccaaacctgcagactatcccatctcagtaaataccaacctttcctgtttggtctaaataccatgcttacactttgcccctttctttctctaaactctacatatgtagtattaactctaccttcaaaatatgcccagaatctggtaacatcaagccacccgcagcacgtgcctctggcccaaaccatcattgtctttcacctgggttactgtgataatctgggccaccactcatgtctcccgtgatatacactcaattcagcagccagaaggccatcagggcaggtcactcttctgctcaggtcctttaaatagcctcccatttcagtgagacaaaagccaaagtctttgtgatgttctaccaaattctacctgatctcatcccatgctcactcactctcatcttctgccgctctcccctttgctcactcctctccagggatagaggcaacttgctgctcttcaaacttgccagcctgccccatctcagggatgcactcactgcggttcctactgcttttgtggttgctgtttcctctgtcactgctatccttctcttcccctacagtagggtttctggactgcggcacagttgtcacttcagaccaggtaattctttattcttatgcacagtaggatattttgtagcaccccttgcctctacccaatagatgctagcaacacatctgaggttctgacaaccaaaaatgtctccagacatttgagaaacattgccctagacacatatataacatggccccttccttccttcaggtctctgctcaaaagccactctccccatcaccccatacaaaatagcaaccaccaatgttcctcatggtgatttctctccttgggaatggctattagtgtgtatatatatatatacatatatatatatactatccatttatatgtatacgtatacacacacacacacacacacacacacgcacaagtttattacctgtcctctggctagaatgtaacccagcacctaatttcatgtcccactcatcaattaatatttgccagaggaatgaatgagtgagtagacacacagagttcagtggaatgcagagggaaggtcagagacaaccctccggaagagaatggtaggccttatcttgacatcaggcccatctgaccccagacaaaagacctctaaagtcaagcttctggggaagtctgaagtagaaagcagacaaattccagaaggttgaaggtaaaaattgcagtcttgaggttgggctgaaccaggttcagactaaatcatgtacaagagcatgacattgtgctccatgactgtacgagcaacagaaaacccagttccaaccactaactggggatcctggtcagagatgctcctggagaatctccttccctccctgactcctatagtcaagacgcagtgaccaagacacacctctgtaactccaacacccaacacagccctaaacataaatacgattccttacaatcctggaaccaataaatgtactctgtgtcatttaagtattaaaacaacctacgaagtctaccattcgctaggtgatggattcagaacttctcaagctagtgtaagaccattaaagcaaaactcaaaccctgtagacaagggaactcctgggaggtttctggggcagggaggtggagagagagaagtccctcaggcctctgcagatatttacatttcaaatgcacactgaagacctgaagtcatgcgagagggcggtgaaatgaagtaacaacaacaacaaaaaaaggatggcttaaaaaaataaaaataaaaatcacaatgtgaaagaaagcaatttaatttaacaaccattaaatagatacgcagagaaaatgaccaatgcataacttagtttcaagaaaaggaaatgaagcgtgtcattgttcttcaattaccactcttatcagccaacctcccattccatggctcagaacctcaggctttgaggtcggagacttcagtaacattgatttactatagcaaggaatatgcaaatctcagctaaactgagcactctccataagctaacccctactcctacctctcggatattagcagaattcatgttttttcctcctgaccatgaaattaaagcagaaatgggatgtgatttttttaaagacatatattacaggggagaatttaatcacacagctctatttcataaaatgatgtcctcatgggaaggtttggtagctctgaactgtgaccaaactgcacacacagtcagtagccccatggcaatgaattattacaggcctctaggtccacatgaaaaggaaagtgaccattctcgtaagtccacaggcatgtgtattttctttctgtacagaagtagacaataaccccccacccccaaaaatgcaatattttaaactttaatagctcccactcaaactacagaaagtgctttggactacatcccagtttcgtttactattctttctttttttaaccattgagaaacacttttgtttttccttgaaataagattttgaaaggcattggaaattcatagtttcaaagccattaggtcaaaagtcttacttgttcccacccatccccagcatgtagacacacacacacacacacagagacacacacactcacacacacacacactcacatacacttccatatatataatgggtaaaatctgaattaagagaaagttttccaggattgcaagtggggaaggatgaatttatgattaatgctgccctaaagctctatgacattcaagctgcattcaactacatgatattataaaagtgtcacctcataaaactggaaacgagggtttaaatcattgctcaagcgaaaaagtaatttcagacaaaaatatctatcacgtataaaatatttattgagtggcatctactgttatacataatttatgaaatacctcttggataagatggaatacttaacatagtagagtgggccaccctcccccaactccagacacagggtcccaaagaaatcaatgtaaaatatgtatacttgcatatattttacattgaaacaaagattttggcaaccatgcttatttggattaaaaaaaaaccccacaaactgactaaaattgtcaaaacgtagcatcagtttattttaagcatcctgttcacaacatttacaaatgatatgctccatatgtttttcttcaacctccaggcatctattcaggtgaaatccatctgaatttaaaacacatgccctttgctgggactctcacagactcacttctgccccttccggtggctctggtgattgcaggcagggctgcccagatctcgtgggaagaagaccacaggaggactcggctcaatgcgcaaggcccgtgtaaccaccgtaatggtttatgagagtaagcagggagtctagctcttttaatcacaaccacatccttagtgcccagcactctgccttacaaaagtcaacaactttcttgaatagataaccgaaaatgatacaaaaacttaccaacaacaaaaatctattttttccccctcttagaaagtctacctgggatctagattgtacttggaaaaaactgggaaaagtttgacagtgtgtctgccccacgtaaattaagatctctttaggaataagaattgcgtgtcttcacagagtatgttaggtgaatatagctgcaccaggcacacagtagtcactcagtaagtgctgattatttggttctatagggagtgatttctaagtggcactttttttttctgaacagacaagaatgaaatgtcaggatctttttgtgaaaatttatgttacagagaattatatatttcactagcgagtagaattttgtagagttgactcacatcataaagtgcacataatttctgcaaccctgactacaaacacagcagatgtctgggggctgggggttggggacaatcagggcttagagcacatgcccagtgtggctgtgaggatgggggaggaagtcagatagccagaaagacgttgaaaaaaaataaaattatcctctagtaaaactactttttaacttaaaaaagttgtatgtgattttatttaaatttaacagaatgaaactatttcaaccatgtttctttattattaatataagaggtatttcctaaaatatccttgtaagtcaagaggttatgaaacataatcacagtgcatatacatttttcataagtgtttcagttttaagcaccattacctgaatctgtaccggtttgagaacgttgcttcttgccttggcatctgaatgacatcatagctgtgtcgattttgggccacatggtgcatgttgggcagtatggtacttactttcctcagaaggttaaagacatggctccactcttttcaaagctgaatgctactctaagaaaattaagctagtctgacttttagtccacagcagataatttggttttatgtctggatgtttaaagagtttcttctttatcttgaaattcaatggcttaattaggatagatctcagtgttgaacatcctctactctatattttcctggaacacaatacattcttctgatctgcagactcagttctttcatctacttatttttcatttcacaaagcttgtcttgttttattttccattttctatttcatttgttgaccgtctacttcaagaacaccaattgtccttatattacactggtctttgtcttctatttctttcagtttctgattgctttactatcttgatcattccatttgtgttcaatgggcctaacaagcctttattctcttagtaatttgattttcagtggggtctattcttttccttgatattttctaaaattatgtattagtcctgcaatgatgttgttttgggcctcaaaggctttctttattctacaatctttcttttttcatctcactttgctttttattaccatcttgctttgtttattgaattcatgtttctcattcatttgttctaccgaatgaaacaattgtaaggaattcccttctctcccatgaagtgtgatttcatctatattgggatcttttatcttttgcgtgctatattcctcttctttcttgttctctaccagcccatctgcccatctatgcagccacccatagctatagttatgtttatataattgttctacatttttttcatctcgtatatgcttaggcgtatctgtgcaaatattccatgtgccctaacataggatgggaaactccttgatgcttgcctggccatatctgtgacgtttctagttgactgagtagtctgcagtccacccacttttctctagccagatggaatgacagagggctaggaggtctcacctgaggcaccacaggctttgtttgaggcccagccctctcttcctgggctccctaatgattgggaaggggtcctcttcccagggggagggaaggggcaggatgccctcgagcttcttaatgtttccccaggccttcacttacaagagagagtcagctcagctctcacttcattccagttaccaccactggccatcactactactcttcagtaacaataggaaaatcaattctgttcctccaatttgaaggtacagtggggggtattctggaatcatcactgattcagcttctcaggtgcaggtttaggaatatccccttcacaatctttccttttccccagcagccactcatgatcttttctcacatgcttctcttagtgacttacagcagtattgctgctgcaggcttgtatgtttgctatgctttctattatttcttcatttatttgaaatctgtgatggaatcaccaactggttttttaacattgaagacaagaatagcattaaaaggctacaaaaaggaaggatgaaaacagcggtactccaggttttaggggatttcttgagcaaagatacaaaggctaaaaacatgggcaaacagtcatcccttgatatccatggaggactggttcccggactcctgaggataccaaatccaagaatgctcaagtctctcacgtaaaatggcgtagtacttgcatataacctatgcatatgcttctgcatactttaaatcatctttagattacttatcataccaaatacaatgtaagtgtgatgtaaatagttattatactgtattgttcagggaataatgacaagaaaaaagtctgcacatgttcagtacaggcagaaccatcataggtctaacatatcatacatatcagcaatagtacagcattttctcaatttttttctaatattttcaatctatggttggtaaaatccatggatgcagaacctgcacatatggaggaccaactgcatacacaaggaaccactggacatccagtttagctggtaaacctggaaaaatggtctggcaagcgaagcagatgggtcactatttgattcagagactgggaaggcattgacaattttgaaaacagaaattggttgctacttcatcagatgaatctggcaggatgtatagggtgaataagaacagagtaaaaagggggatgggattagaatggaagtgacaccccttgagagtcacgggacaggtatgtggattctatgtgactaacagtttcggttgatggacattaagtaaagacattctcctcaagtgttttactcctcttaatgagaaatacggaaattggagaactgcaagaaaatctgatagatgccaaaagatttttattgctaggcaaaaaatatacttatgtttccttgtaatactttccagggaactcagtaaggaggtattattcatgtgtgaagaatcactcatgaatttgacgagcaagtggtgtctagtaacttacatgtttttaataatgtacaaatgctaaaagtcgttatcagctgggcgtggtggctcatgcctgtaatcccagtactttgggaggctgagatgggcggatcacttgaggtcaggagttcaaggctagcctggaaaacagggtgaaaccccatctctactaaaaataaaaaaaaataataaaaaaaaaaaaacaggtgtggtggcgtgcacctgtagtcctagctacttgagaggctgaggcaggagaatcgcttgaacctgggaggaggacgttgcagtgagccaagattgtgccactgcattccagcctgggtgacaaagcaagactccgtctcaaaaaaaaagaaaaagtcattatcaacaaaaaccaattagctctgaaaccctgaaagtaagcaacaagctggcgttcatccagaagctactgtttctcatacagtaggcccccctgtatctgaagttttgctttccccggtttcagttacccaatgtcaactgtggtccaaaaataggtgactacagtgcagtaagctattttgagagagactattaatacaacttttattacagtataatgttatcattgctctattattagttattgttcatctcttactgtgtctaatttataaattaaaatttagcataggtatatacatatagggaaaaacagtgtatatagggttcatattgtttgcaatttcaggcaaccactggagggcttagagtatctcctctgcagacaagcgggggcctattgtattctattttccacataggaagaatcatgtccatctaacaaaggagaaacagtcaccaagattactaggaagtcagtgaagctctgtcaactgcctcaaccaccatcctgcctttctcctcctttggtccataaaacccaagcaagctatgatgaaaagatgttaagaatctccttcattctcctccaggaaatgacttttttatttttgctctgttcccagagagtgacgacgtgaataaaaacaatactggtaggccagtaacatgttctacatccctgcaaagttgattagtaatatgtaatccttcaggtaagggctctattaattatgttctatgaatcacaatcagatttaaaaacaaacaaaaataaaacaaaacaaaaacaaaaaagagaagggaaggagcggtctgtgaacgttaacaaatggaaatccactggggatcagcctctgtcagaactaagctccaggaaggaggaggttcaggtgggaaggcagagttcacaatccacagcttgggaaaaagaatcaagtgggtcagcctagaaatcacctttgaatcctctctgtgcttcagacttcacagagctctacccgcatgatatggtcagaatcatccacaactttccatctccactgctactgccctggtcccagtaaccttcacagcctgcctgaatctctgatatcccccaatcggtctttttgcttctcttgccaccctaccatctactctccatatggcagccagagccaccttttcaaaatatcaagagaccatgcataaaacactacaatggtttcccacacgtttggaataaaatggtcaccatatctcacttaatcttgcccctgcccacctctccaacctcatctccccttcactttctacctgacaatcacagcggcctcctcattcccactgcagggcttctccgtgtgctgtttagtctgcctggaaaattctcccctaaatctccatagcttgccctttcttgtcagtctgttctattcgggaccaaagacaccaatgagtgagattgtattagtccatttttgcactgctgacaaagacatgcccaagactgggaagaaagaggtttgaatggacttatggttccacgtggctggggagccgtcacaatcatggaggaaggcaaggaggagcaagtcacatcttacatggatggcagcagacaaagggagagcttgtgcagggaaactccacctcacaataccatcagatctcttgagacttattcgctatcatgagaacagcacaggaaagacctgcccccgtgattcaattacctcccaccaagtccctcccacaacatgtgggaattcaagatgagatttgggtggagacacagtcaaaccacatcagagatgaacaaggtccctgctcagacaaagcttatttcctatgcaagtaactccacccctactcccagacacactctatcactccacctggcttactgtctttacagcacttaaagtgatcaaaatttctcatacattagtttatttgctgtctgtccctgcagaaagcaaagaataggtccaagccaagatgtcaatcccagagaaggagaggtcaggatggggtcagtgagagccaaactattaaaaacaatacccaaggccaagaccgtctcttatcagtcccgtttttaatgctccttgccagtcaaaagcagcccttaaaactcaaaacaatagttaatatggccagaataagccagaagtgaatacaggaattttaatatttagttctaataaactatcatcataaataatttaataactgtccccaaaatctgtatctagcatcacatcagacaggcacctatgatgtcactgaaaatgaactaaaaatataaaagccttgctttttccatgactttaaaacaatccatattacaatacctatggttaaaacacacaagcgcgcgcacacacacacacacacacacacacacacacacacacacacacacacacacaggtacacatttagaaccaatgaggaagagccacaggactcaccagggcagaattaggagaagaagggtctggctaccaccacaccatggcaccaacaaacctaaatgtcctgacattactggcagtcagcccctaaacagtaaatacaattaatactgcccttttaatgaacagaaactcttggggcagttcaatttccactacacttcccattgcagaaacatcgatctttatttaaatgccaaacagctaagtgttggcacacagttcagagaagatgctgtgtggatcttttggatgaaacagtcctctccgctggctgagcaaatcatcgagatgtcaggatttaaattatgcaaaatgcataataccaattaaagaaattacgtgtgaaaatatgcaagagcaaatttcctcacattaatatttaactagactttttaagtagagcagcatcttctgatcacaagtactttagtatatttcacctacatggaagaccaaaatattcaggatggttcatcagaagattctaaaagggcattttctgtataatacaaacattaacacgaggtaaaacagctaacggaaaggattactttaagtgggatgttgtggcccagaaagcatcagtctgacattggccttacactttggtcttgtaaagctggcccgttcttgtttctcacccacggaaatacgtcatgctcatcttcaccctccggcctgtgctctagtaataatgtcctactaggacaaccctctgattcccagttacaaatgtttccccttccccaggagtcagttagagcctactcaggactactgtggccccttcctctgcactgaccagttatcaggcctaatcgcatggatctccgtcaaacacagatcagtgactttacattcatgcactgcttgtttctcccgctagaccaagaagctttcaaaaaattggtattttttgaaatgtcaaaatatcaaaaaaatatcaggcttgtgcccacaccagatcctctgaatgagcatctcaggagcaggatccaggcatttttttaagctctcaggaattttacatccagggttgggctatgattttctgtatcctccaaatgacacctctatcctgctgggtgcactttgagaatgctcaaaagggcaagtactgtgacctaactccttcatttgccagctaccttcttctgtgattcattcaaccaacacctaacgaccatctgctacttgtcaggtgctagtctacattagggatatatcagtgagtaaagcaggcaccctcttatattttatctatatctgtctctgtctttagatctaagtctatatctgtattatatggaaagatctatctatattacattaaaaaatctacagatatacagtcctgcatcacttaacaacggggatgcattctgagaaatacatcactgggtaatttcatcactgtgccaacatctaaagtgaactcagacaaattgacatgtggttaccagaagctggagtggttgtaggagagggttggggaaatgttggtgaaagaatgcatatttacagtgatacagaaggaacaagttcaagggatctactgtacagcatggtgactatacttaatgatgatatattgtattcttgaaaaatgctgagagagtggatgctaggtgttctcaccacaaaatgataaccatgtgagataatgcatttgttaattggctagatttaaccatttcacaatgtgtgtgtgtgtgtatatatatatatatatataaaataggtgcctatctaatgcgatgctcagtgtatatatatacatacatattatatatatatacatgatgaatatatacaattttccacatcaattttaaaaataaataaatttgataaatcacaccttgaaaaaaaattctatgacggaacttgtaatggtgtcttggcatgattctgtgatgataaatatatctggattcctagcttttttaattacacagaaaataaaatattaaagccaaaatcctctggtttatctcttttgcaagctactctgcaccattctttcacataaaattggagtagggtgggaggagaaccaccagcagcggcaaaatgaggtcttctctaacaggtgagatgttagaggttaatccctaagcttggtgcacagcctttgtttatttcttagccagttgaggagccagtatcattatcagaagggaatttaggaaaaagcaagaaggtgatgaagaatgagagggaggaagaaaagaaggaaaaggaacaaacttccagcttctcacaattcccttctgaaagacgtacactgcccatggcaaggcacgctggtgagtaggtaaagaccatcccctaatgagtaggctccttgcttctcctaggatatgggttaagtaaccccaatctgaaaatccaaaatccaaaatgctacaacatcccaaatgttttgagtgccaatgtgatgatcaatggaaatgttcactagagcatgttggatttcagatttccagattagagatgctcaaccagaaataaaacctgctttttatggagaagagagaatataacccccttccaccttgtattaatcaaatattcactccaatcactaaacccaaatttgtctaataaatcaaactgttcaaactactgcttatgccatgagtaatgacaatatgtcaaagaaaacactggtacagaagggagtttcttccctggctgtgcagtaaacttggtgaaaaggagggaaaccacaacccagacacaggacaggtgactgaataaattgtcctctatgaacccaaagagttaatattttgtaaaaccatctgccactcaagtcctgtctcatcccgtccctttgagagttcacaccatttatatcgtaacagaacactttacatgaacgccagctccaaaggggtccccaaacctctaatcaatttggcctggatataaatgtgtatcttggttgtataaatactactatgggcaacaatactttacacaagtattcctgtaattgatacactgcactttgacattattaacatatctttagctagataaattacccagtaaatcaaaagggctcattcactcagattatgcaggagaggactgctccaaagcccaaatataattttgaatgttgactgcatatggccccaatagtttattaaaataaggaatataatccattttataaagagaaattacattagaaagacttttataagtaaagcatatgtggctaaggttatagaacttgtcaaggaaatgtgaagttcaagatacaaaataaattgtgtttgctgatctggtccattaatagaaaagcagtaaaccaaatacaatgtaacgtacacatgcaacactttccaatcacacacatcaattaggtttgctaatatgtgcagtgcaagccagctatctaaacatctaacttctcacaactacagtcaggagtcaaaaggaaacaaactctttcctaagccattacaaacttcaactataaaatctcacatctttcattagttaaaaaactatttacatgttgtaaactggatacaatcactttggaaaactatttggcagtgtcttctacagtgaaataatatccacatcacatgacccagcagttccacccctaggccctatggtagaagtcagccaactatggctgaaggccaaataaggctgtctgcctgtttttgtatggctggaatgctaagagtgatttttatattttcagatggtccaaaaaaaaaaatcaaaagaagaatattacttcatgatgtgtaaagtgtataaaattccaatttcaatgcccataaagctttattggaatacatgttccatgttcattcatttacaaattgcctgctgctttttgctatcatggtgtagtaccgtggagtacttgcgacacaggtggcgcgggccaagaagaaggaactgattactacctagcctttcggagcagcagtttgctgacctctgcattatgcatacatgttcactgaaagacatgctaaaaaatgttcatagttttacacagttacataaaattccatttttttgtatctactttaatgtatgtaacctgtccactgttcgtgggcatttaaattgctctcagaacctttgcattcattagttattgccaacaatgctgagatgaaaaacgctgcacataccttgaacctttcagtgctagctgagagaaagcacagacattcatgattgattctcatttacatgtcagaaacaacaaaaaaaccttccttgaagcttctattctaaataaactaagttctttactgaactcaactgagggcaaaagcctcctctgtttccagcgtctcagcatagtgttagttatcacacatgcatttactatagattgtgaacggaaaaagggaaatacgaatatattagcaggccaggcatggtggcatgcacctatagtcctagctactcagcaggctgtggcaggaagatcatcagcctaagagttccaggctgcagtgagctatgattgcaccactgcacaccagcctgggtgacagcgagactctgtctctaaaggaaagaaggaaaagaaaaaaaaagaatacatgagcacatatatttatttgtttttattgccatttttccccaaagaaatctataataaatgcacacatgataactaacattctgtactcctggaccctgggagcaggaaatctttggcctcagaaatatatatacatctatatttattcattcttatttattcatttgtattcagacatgtatatacgtgtgtgtgtgtgtgtgtgtgtgtgttttaatctaaagtcattctaagcagggactttatgaaactaattttatttttaagtgagcaatttgagtaacaaaaaaaaaaaaatcacaaatggcctagaattctaagtgctctcaaatggcataatcaggagcagccttgatgacctttttctgaaaatgtggacttaaatgtccgaatcaggtttttgtccaggtcagcacttttagcagggaaaggcatgtcagggccatttttacagaaccaacgaggtgcttacacggtgacactaagtccagagcagtgtgactcaggacagtgtgcaaagtgcttgctgccattccagagtaagtgccaaaattaaaggcaaccattgagaaacttcagtgcaatttgacagagtaattttataaacattgcatctaataaaatactggggcttccattttttgtgtctctctttttttctactttattatgttagtagttcctttttattgtgctttacagaaaagttagtgtgtgatggattaaaatatgaaaaaataaaaccctgtatttggtcatagacagtgtagacaacctcctcttcctgttgaattcctccagaatggacagcctatgagagtgcagaagcctgctgttgctgcctttatttcttcaatgtcccataaaaagtgtaagagccagaaaaaaggaagttgtcacctttaataaaaacaaaatttacccttgtgtaccacttaaaccatgagaaaacaatcaagaaagctaaaagttcacttcattgctaaaaggtgaattcaaaagtttagaataaactataaaggcagttccactgtggtcttaatgagaacaatgccaagcattagcttattccaactttggcagacctgtggtcattatcaaaacaccagatcggggttagtttttactttaattaatctaatgaaccggctgtctggcttcagtagacattttttaaatgtcactgcgtaccttgaggctgcagctgaactggtggcatgttcccctgcaccatcttgattccattaactcttgcctacagtgacattttaagtctgcatccttacatgccttgataatgtagtaaatttgtgctttattaacccaattaaaatacagaaatgttaggtaacggaaatcaacaaaattaaaacaattccttaaaacagactagatctttaattcaaaaatatatatatgaaactacagcttccagactttggtaacctaaaaagtccctggattctaatgttaaattctaaacagggaaaatgctgatctaatcataagagaatatactatttaaatcctaggtattgtgttaatttaggcttaaacatcagtaggcacgctaggtcgaattgtgaatttctgaagactttgcagagtaaacaataaatgctcctacacaaaacttgcaggcaaatttgaaaaaatacttggactcacaataatctatcctgcactagaataaattcacccatattcaccaactctactcccacattttcagaacaaggaccctgtcttttctaactttttcttcccagtgctgagcacagggcaggcactcaaatataaaatgactgctcccttggaaactaagtgagcattttgtaaattgtttaaatgacaggccacacttgcaaataggaaatgagaaaagagtttaatacatctcttcaggggcttatctgattcaccttagatgtgggccacgtagaacatctgcactttaagttcctcttgttctaaaaagatctactatggcctaaaaactctactcttaagttagccaaggaactagacaattgcagctaagtaataaatcagactcattctgatgttaaaaaaaaaaaagttccttttttttaatcactttcttgaactaagatcacagatctgccacctgccttcaactctgcagatcgtggggcgtggggtaaaggggtcctagaggatgacctgcaacgtcactaggaaaagaaaaggtgtgacagaaacttatactggaaaagtccaataaaaatgcctattgcggctgggtgcagtggctcacacctgtaatcccaacattttggaggcctgaggcaggaggataatttgaggccaggaatttgagagcagcctgagcaacaaagtaagatcctgtctctattaaaaaaaaattaattgaaaaaaaatgtctaccccaagctctaataaaaactctggcttaagatggcaactgctaaagccataagcagctgtttcatcctcatctatttctgttttagatgaaatgtaaactaaattcaatatttctaacaaactagaaatattggttatatgggccataccctgaggagttttatcgataaaaccattgacaagccaggcatggtggtaggcacctgttgtcacagctactcaggaggctgaggtgagaggatcacttgggcccagaagcttgagtctagcctgggcaacacagcaaacataacaagactctgtctctttaataacaaaacaaaacatggacaggtgtgtgaagtaaaacacaaaaccagcaagcttaagacaggaagatttctatctgtgcttcttcctacctccactgccaattgttggcagaaattcttttctgaagtatcctgggctaggtcatcatcccaacccaaccatccccattgatattgctctttctccaccagttctcactcagtcatcatcacagccatctccacagggtggaggaacaggccattgcacactgtgtcttggcacatggtggaggtaacgggaaggggcggaaagaaagctgtgcacagtgtcctacaaagaagagagtttttcatgctgtgtttatgctaagataaaaaatgcagatgcttccacgtattatggataaatcctcctttaaataatcccataagatattatgggaataagcctttccttatgagaaagacaagccaaactagacaaatgaagaatctggcaaagtgtagaccacctagcccagtccttcagctcatgacctcacacagatttctaacagtaagaaggtaggcagtgtcagagaacaaagaaaatcctcctgggcctggacaggccactcctcagccaggcaaaagcaaaagcaaacaaccatcaaaagcaaaacaaacaacaagcaacaataataataccaacaaacatcaaccaacatcaatgaccataaacagcaagcaacaaccactggcaaacaatttaagtaagcaacaatagcccacgacaagagccaacaacaacagagctctcctagcaaaaagattttcgaaagcaaaataaagggaacagcatattcaagatagcagaaatgaagtgttttgctctattctgcttacaataagaagctagtccaagaaaacatgaccttaagaaaaacagatagaaatatgacagagagagagagagagagagagagagggaggaaacaattgacatgtgagtggaaactcagaattagattctatattagaaggagaaagaatacaatctacacttcaaataatcaaatgggtaaaatcagaaagcaaacatgaaatgcagtcatagaatgaaagtgtcaagaataaatagatgaaaataatgtaggagaagataacagacacagagaaagaaaaaatggaaattgtcaatgaaacgtaatgggaactgcagaggaaagcgaaagaataaatgagggacaagctacactgaaagagtcaatggaaatgagctgaaaagaggccagcacctgaccaaaaaagggggtctctgaataggaaggcaaaaggacggaaagacctgctgaaaattttaaattttaaaaataaaattgtaaatcctatagtatcaacacaaaaacagagaatgtttacaaaagaaaaaaaatgttacgccaatgaaagaatgtcccttggcaatactgagctccagaacataagaaagtgactttcacagcagtttgaggggaaaagatcaagagcaaaatagttcttcactcacatagttcttcatgtgcaaaagtagcaaaatcaccaaaagaaggtccacaaacttgctctgaaaacaatgactctgagatgataaataacagacaacctaaacaaagaaccaaagaatagaggtgggagatggtctaaaccgagtggaagcaagcattaaaaccagttcaaaataaaggctgatctcaatagttgttggaaataaggttataaaactgaatgcaatgtcaaaataggtaaattaaatacaattatgaataacaggatatagaaccccttatcaaataaacaacagttaaatggatggaaggtgggtgagaaaattactggaaaaatagttgctaagacagagccaccttgacatgacttgcttcaacaaacattcactgagcacctcatgacacatgggtgcaccagggcacatgaaagtgaaccagaaatatagtttttaatgaggataactataagaatgaacagcagaaatactagaagaaaatcgaaagaattaagaggaaaaagaaaagacagatcataaaaatgcttgctttcagaaagcatattatataaattaatatactatggacaggctgggccatggtacaagaatggcaaacatacgcttttcaaaaattataaatgtgatccagcctatttcaatatttccatagattggtaaagtttatgagcatttggtcaaaaatccaattttatagatctattttatagatctttgctaatttagatcacaaagaaaatatatagcaagctagaaaagacacaaatacctatacacacgcctcagtattggtgtttatgcaacttggggctggactcatctcaaaagaaatgaactttacaaataagccccaactctaccatgtaacatcttcactcagagctcaaagagctatcagttgccttcagcttaaagtaccaaaatgccaggtcagcctgagggttggcaaagttctaccgcaaaagctttcccagcatgaagcagacaaaggagtacagaagagccaaggacctgagaaccctgagcacattcacagacagacatgcacacacctccccacctgccccacaggctgttcctccgctccagtcctccacgtcccacgtgccttgttactattctccctgtctgactgtattgtcacgacgtgctgtctccctctctgggctgtgagtttcatgagaaaaggggcagcatctcactggggtttggaaccacagcacctcacagtacctggtgtatggtacactcaacatgcagtgtcaggatgagctgagctttaagcaagaagagatgctcaacagcaagaggaaacaaacagagtcatatttgagatctggattttgatgacaggagttcaaaaccaaagagacttgaatgtgccactctttgaacacagataaacagtaaaatgatgtgagcaggttatagtttactatttttcacccaagactgtcacaatttgttttaagtgacaggtgatgtgagtgtatgaagagagtgccgcgcatcttctgtcatacctgcgcgtttacagacaggtctgggtcagtcaaaatctcagtatcagtgtttcttccacattatatggaaaaataagcttgtcagcacagactctgcaagctgccttccaagctcatatagaatgtacgtctggaaaatacaaatgagaaagactgaaatagagcaagtcgttcagcgtcgcatgtggctaatgtctttagggaaaacatttctataattgtaacttccttatttggccttctgatgggagacatttatagcagcaaatgtacgatgctgctagacttgggagacataaaaacacatttcatagaataatgagagacagaaaaaaaaatggagctcctctagccacttggaaagtttacgaagcatacagaactacacttctcttagtatttaaattttcactaatggtgattcctgataaatcataaatggcccaaaacagcactcctaagtaatttgaagacttctttctttggatcactatgccatttgcattaagttgaaataattactaccatgttaaaaaaaaaaaaaccaccaccaccacaacaacaacaacaaaattactctgcagaagaatgtagtcaagttcatttaagctctaccttgtagacttggaaaacagaagtcaggagagaaagcaacactaaagcaacattaaaccaacttcgtattcatgtcaccctatccagtgctgtcgaagattatatatccaatacacgctaaagattcctggtatttgtagaaatactggggaccaaactttttttttattcaggccttggttttatttactttaatattcagtattttaaagctaagctcatgtttacctattttaaaaggaatatgtagaatctatccagactctagaaaaggtatgggcactgctcacacctgactcttccttcttgtcctaaaaagcatgaaaagcagctggaagagtaactagaacctctttatgtttactcaaataacatgagtaagtgaagggacacccacaacatcagaactgatggcatgggaggggggcaccaggtaagaatgggtgggtctgtaagtagcagacccagaaaccaccagcaaatattcaccaacaggaggagaggggctcaggctcagtaggaactgctctgagaggatctgagaatgaacagggtggagaagggagcagtgagaaaagcagacagaaacgtcatggaaagtgaacaaagagtccagagaaattgcaaattcagcagcaaaagaagctacaggatattgagaaactgagaaggctgccctaagtcttccaacctcacaggaccctcatgctaacagaaaattcagaaaaatacaaataatttgaatatgagcaaaaaagtaagtaaaactgccataacccctataagaaaaaaaaaaaaaactattgtttctcagaagcagaagaaaatgcaccagaaaagtatatccacaaagctagaaagctgcagtgaaacatcctaaaacttcaaagacatgaccggaaacagggatgcagaagaaaatgcatagaactcaggaggccgggagcagtggctcacgcctgtaatcccagcactttaggacgcagaggtgggtggatcacgaggtcaggagatcgagaccatcctggctaacacagtggaaccccgtctctactaaaaatacaaaaaattagctgggcgtggtggtgggtgcctgtagtcccagctactcaggaggctgaggcaggagaatggcatgaacctgggaggcgaagcttgcagtgagccgagatcgcgccactgcactccagcctgggcaacagagtgagactccgtctcaaaaaaaaaaaagaaagaaaaaaagaaaatgcacagaactcaggaaggatgaaaaacgaagaaaaaaaaatagaagaagtgaagaatttcaaaacagtaagtaaagatcaatctgtaaatacacatgtgtggcaaccagatagccatttagaaaaagataaaactgatgccatactttacatatttcacatgggattaactctaaatagaccaagttccaatataaaatatgaaactagcctgggcaacatagtgagaccctatctttaccaaaaaaaaaaaaaaattactcaggtttagtggtatgcacctgtagccccagctacttgggaggctaaggtgggaggataacttgagcctaggagctcaaggctgcagtgagctatgatcataccactgcgctccagcctgagcagcagtgagatcctgtctcaatcaatcaatcaataagataaaatataaactatataaaatgaatgaaaaaattaattgtactagagaaaaaatttctaattataattcaaactccagaagccataaaataaaatactataaatttcactataaaaactaatctgaacatactatatgttttaataaatatacatacacatacatctataaatacaaacttctacatgattcacatccacacacatacaaacaccaaagaagataaaatggatagacaaataaaacactggaaaaaaatatttacaatatatattactgacaaaagatcactacatgaagagccatgaaaattatgggaaaacgcaatgatcaaaaacacaaatggaaaaatgggagatttataggaacatatttcacggaaaaggaaatgtaattaatcggcccttaaataaaaagctgtcttattttcattcattaacattccagaagaggaatacaaatcaaaaccaccatgatccatttctgatctatcagaccagcaaaatttttagtttgataacaccgttgaaaggctgtggaaaagcaaaatggtacaactcttatgaaatggaatttggcaatatctttctaaactaagattactttatccttgatttggcaatctcacatccagaattctagcctgtgaacttgcaggaagaagtacagatgacgtgcacacacacatgcacacacgcattattctcatcccttacgacactgcttatctttcaaataattgaaaacaaaaatgcctaaaacagagaaatcttggggcgatctacaatgtatctacataataatgtaccgtgcacttgtgaaaaaaaggaaaatctctaagaagattggggacatactgctacgtgaatacagtcatgatgtagaacaatgtatagtttcttttttgtagcaagtgtggaggattaaaatatatattcatatttgcttacaaaaagcatattcatattattcatattttccataagaaaaaacaaatatcagtaataattaaaatggctcctactatagcataccagttttaaattttaggatttaaaattttaaattatatatatttatatattaagttttatatataaataaaaatgtatatatggatatatgttaaggtgcgtatataatatatattacttttatgcaattctacagtctaagtcaacatggaaaggtatatacagataaaccttacttttattgttgtccccgtagataaccatggtagtcttaattacatttattacttatttgatttatttgaaagctgttttgaaacagcatcagtaacattgtaactaataataaaattacttaataaagtttaaaatatctttgtagatctttttactcaaatgctgttattaaggaagatttgtcatcagagtcctttcaaatcaagtaagtaaacagaataaactcttttgttaatggacttaggaatcaaggctttcagcgtaaaggaaaacacataaaattatgaaatcgaataaatacaaacactgtatttatgaaataaatatcttagaagcaatagtaccccagcagcaatgagcaccctagttctcagaagtaggaatcagaactctctcaagaaatagctggtctcaactctcagagagaaaagactcaatatgtgcatgggacatcttattctggcagaaagcaagaaagctttcagagatttacaagtttgtatagggacacgggctgaaaacagcccctcaacaaagttgtgagtttgtgcatccaaaaagcagaatgtctgtcgttaactgaaacacaccgaatccaggaaattcatgattctacaacgataatcaaaggagaaaaagccaaagatgagggacataaatcatttgtcttcatttgaaatgactataaaaccaacttgtttttttaaaatatatttataacaaaaacaagagagacagggtcttgctatgttgctcaggctggtcttaaacttctaggctcaagtgatcctcttgcctcagcctcccaaagtgctaggatgacaggtatgagccactgcacctggccaaaccctctgcttatcttaaaaaaaaaaaaagttataaaaagaaaaaaattaaacattatcctgccctttcagaggactgacatggactctggtaatcaggtgaaggttgacctttcaaacaaatactgacaaataaaggaggaagggatgacaaacttagaatatccttatcctgcaacttcctatgaaatcattgactcaggcaagaattatcaactgttgtcaagaccaataaatagttcatgggcactaaagtgacaatgtatactctttattacttccattctaggtccaacacgattttgcatataataaagacaaaaaccagaaaaatttagaataaggagagaaagaaagagacaaaaggacagtaggttacattaaggagtgagaacaggctacaaactgcctgccaggaaatcctacatatgtatttatttggggtggaacaaaccactgaccctaaatgtaccagccaatgcagagagaatgtgcctggctacctgactcaaggtctattaagtttaaaacaaaccctttccagccctttcctccatacagtaatcaaagacactcaaagaccctgagaggaccgtccttcacgggttctcacagagccacaccaacctgtccttgacaacacctgagattatacatggcaacttgctttctagggcgtttcttacaatgtccttcaatacggtatttttccaaaaattagttcaataaaaggaattcttctactggagccaatacaatacaatacaatacaatacaatacaatacaatacaatacaatacaatacaatacagacatataattctgatgatctggcctaatctgggaaaagatttctcagtatcctgaatccaaatcaccatattttactcacataaacccttggcagattcccatttcctaaaggagactcagtttggaatacatagttctcaaatacttaaattctgaaattcacatgacattaatgtctttgcaatagattgcttttttctttgaaagaaaaataccaccagaaaaggccctccatatccttgctaaaaatagtcctgctgtttttcttattccaattaagatacacacacacacacacgtgcacacaaaccctttattccaaaacatacataccttgtgtgctctcttaaccaacaagatacctgatggaaggtgggaccctctgagccccaaagagggaaacaaataggcactaaaagagatcgctaacatcataaaggctaaaatataagtaatttacccaaattacataagtggtaaatagtgtacccagattggaccttaagtagtctgacctcagagaccatgacattacaacgctatgctctactactcagtggtactcccccactctccctcccccgaaccatggattctgtgcctgtgtttttgccacatctggcttggagaagaacatgaaaatggaagctgaactcgcttgccatgtttagtgacctatgaatgctgcacagcagtcaaggctcatccagtgtggtaggacctccccacacagcttataggcttcagggcatagaactgactatttctaaagcctcaggatggaaacagatctatgatgcctgaagatcccaatcacatatcaaatcaagacaaaaacaatgatgataacctttccctcctccttttctccaatggcttttacttacaagctagctctggtaagacaaaatgagttctgggttagaatctcagcaactcttcttactcttgctttattttgataaacaaacaacacttcattttggtacatgttctgggagacctttggtcatagtttactttagagacaggtaatgcaagtgtttcatttttttttaagaacaacaacaacaacaaaatagcaaactgtgtcagtaacctattatttccaaataagatctgtgtggtccactgccaaatgacaaattatacatattctgaaaaggacaaaaaacatgtaaagttgcaaaacttctattagcaatatctctccccgaaaaccatactcattgctgtttaataacgaacgttcaatgcttgactttgctcaaataaaatttaaacttatgttttgatgtcaactcagcctttcatttctgccccaggagatattacaaggtggggaccaggggtgtgaggcgggtcctgaatacatccagctgtttcaggtcttcacctgccttacccatgaaaagcctggcagtggcttgtaagccatcatcaacagctgagtatgtaatatgctgcctagccttgtcttgtgcggagaatgaagaggatactaaacaatccgttgaaaggcctttgcctcatggaatcttacagtttccagctcagtgtgtttataaaaaatcatagtaaggcctgccctagataaggagctcccccttgacatccacaaggacttgaaacagggcaaaaaaaatcaagcacagcttcacaatttagccacgccggcacactggtccaagatcacagaaagatggaggcaaaatccctttttcctttttgagaagaaaaaaaaaaaaatctaacaaaactacaacttgcattacataagtaaagcatgagtgagaggaaaattcagaatccgtgttttaggaggtgacagagagagataattttcttttggcctcatgaagcccttttactttaatcaatcaagaaatccattaaagattctgccacaacccagatcaaaacggtatagttttgctgtgagccactttactgccaaaatgcagctgctgtaagagcaacccacaaaggcactgatggctgctgaagatgaatatcaatgaaagaaaatgacagatgccacataaacaactgcccaaatgagcaagttctagcaaagaaatgaaagtaatacaaaattaatatgcttgctctatataaagagaaaatgttaaattagaaataatttcaccttctcacagttctcacttttcctcttgattacttgcctttgtcacctaggcaattgctcagcccaacggtgggcatgaaaataaaagcaagcattaagaaatcaaattctattataaaagtccaaacaggaagctgttgctgaaattcatgttctgacagcatttctgatatcaatttttgattaatgatctcatgtgtatgggtagtataagctgcattttttttcggaaaactctgtctttatgaataaatgtggtttaatattccaaaaatggcatgcaattctttgaaacatgaggcttaacaaaatgccaatttctagtcaacataggactactatcacatgaaaagcaaagggaagaaaggagggagagagtgggaacagagggaaagagaaaggaagggatggaaagagggaatccatgtacaggtatatacacacacacatataaacacacacacacacacatacacgcacacacaccactccccattagccactctgcaagaaagccaaagaaattaatgagatgattactggaaagtgctttggactctttggaagaaagggactatataaatggaaggtatccgttttcttattctaaaaggcattttcattcacatcaggatgaaacataatacaactaatatccagtctgctcacttttaaaaatgaaaattaatcaaatcccaagtcttttagaacttgcattgaacaaacaccagttctccatttcccagctttaatgcttatgttataattttttttaacaactgcatggagtcacaatttcttgccaaactaatttaatttcaaatttaattacaggtatacttacattctgacttttgagaattacactctcatcatcaagacaaccaaccagaaatattcattgactaatatagagaggcatgaaatgtagtccctgacctcaagaagtttgcaattatagggagataatacttgcataaaatacagaaactatacattaatatacttaatcaacactgtggctggggatggctgccagttgttctccacaaaagaattttcccaaaagcctaggccttcctttacagagtcccaaactgttttctcaaatgtaattatattcaagggcaattttccaaaagtagcagcacacttccccgggctgtggagtacagcacactgtctcctctccctgggtctctgagtcatcatttggacctcagatgactcaagtgtaacagaactcagtccaggtctttggtggggcctctgaaggccatgtggaggctgctttcatcctccaccaaggagttatcaaagtgcttggatttgtttaaattattctactttaaaaatcagcaggttgtcactaatgtaagctatcttgggcctgctcctcagagctcctatctcttctaattggatttttgctaatctcctgtgggttaggaaacttaaatcgaatcttaaaagttgttatgcaccaaagaatctcatatgagtgaaagtccctaaaacattccaatacttcccagcctttcctttacttctgacctgtgctcaaaggacttgctctgttttagtactcatctagtttctagatacatgaaactgtcaaatgcatgtatgtctcatgtctctactcacaaatacctagtttaagagaataagaggacacaaaaatagagaaaataaggagtattactgtgggtaaaaaggtagtatcttttttcaacaacagaaatttcaaattgttttcaccaggaacccagacagagtcttgactcaagtgaccaatacctgcacatattatagtaacatgcttttaagataaatagaaaatgctgcaaagaactttaaataaaatttaaatgcaggttggcttcaaagtaacaaaaatcaggttggcctaaagtttctcctcggcttgagaatttggatgaaaaatagagcatatctaagctttaacaaaaacaccatgagcaccctggctgggcacagtggctcaggcctgtaatcccagcactttgggaggccaaggcaggtggatcacttgaggttaggagtttgagatcagtctggtgaaaccccatctctactaaaaatacaaaattagccaggtgtagtagcaggtgcctgtaatcccagctactcaagaggctgaggtaggagaattgcttgaacccgggttgcagtgagcggagatcgcaccactgcactcaagcctggatgacagcaggagactccgtctccaaaaaaaaaaaatattcgcaatgagccttacaggcaataaagctgtcatttgaaaacaaaaaccaaggtcatttcagggatgacacctccattcatccaatagataaatcaaaatgaagatgaagaatggaggaaccaatggtcaaaggcactgataggaagcaacgaaaaccagaaaaaaaaagtattatgtttattaatacaaatatagtctagatacaaatagaaacactgaaaaaaacagaccatgaaagaagagtgtaataataaatcaataacctcggatgaaaatccccacacatcaaaaactcaaggaaattctgaaaacaaatatcctcctacatacctattgggacagttaaaaaaaatttaaaaaagcaataattataaacttctagagaatctaaatagaaataaaatgtgtaagatgctgccaaattcatattcaaaggaaaatgtatagccttaagaaatttcattgttatataaaaagcctaaaataaactttttaaaatataaaaaagaataaggaaataagacatgcagacgttaatattttgaaacaagataaatataagatttgaaggcacaaacacaggaataaaaaaaggcaaaacctttgatacatctaatgtaagaaagaaaaatataaatatataaaatgagtagtaagaaagatatagaatatactttcacgataatatatcttttccatatcctttgagtagtaatatttcaaccttgtttcttctttaacccagttagaataaagaacccagaagctcatgaaaccaattgattccactttcccctggaaaaataaatcaacatgtagaaaaaagcaaaatgtcaactctacttaaaataaacaggcccattttgtctatcactatacatgaaaaaaattaagtacacataacaaacaacgctgatcataatggagccaaattaaaagtaatttataatttatacattaaaaaacagtatcagtgattgaaaaacacaaacaactcaagaccacactgaggatatacaaccagatagaagagctctttctaaaaatcacagacagatttcttaatggaatactgactggcagccaatattttccagtaattcccaatttaacacttggaaataccaaattttagtgacctaggttattaacaagtaactgttagataaaagaaagaaaactcacaaaaatgtgcattatatgcccaaaagaattagagaagagacatgaattgttaatgtttctagtgattctcaagtaactaacgaaggcagttatttgagaatcagtggccaaaagcagcagtcttcaaagcggtagttttctaagggctagaacagtgaatattcagcatggctagttttaagggtataaatttccagatctacagccgggcatggtagctcacatctgtaatcccagcactttggaaggctgaggcaggtggatcacatgaggtcaggagttcgagaccagcctggccaacatggtgaaaccctgtctctactaaaaattagctgggcatggtggcacacgcctgtagtcccagctactcaggaggctgaggcagaagaattgcttgaacccagtgggcggaggttgcagtgagccaagattgtgccattgcactccagcctgggcggcaagagcaaaactccatctcaaaaaaaaaaagttcagatcttcaacttccatatgtacacttttctaaaatgtgtctacctgagagggcccctgcaatcctcacccggttctctcacaactcctttttcaccattcttctttcatttcacaacagaaagacttaactgctacccatgctaaattttctacagtacacttgatgtgccaaacagagaaaattcaaatatactggaagttaagccttcttaatcaagacctatgataggacttcttccctttccctgtcttatacatatttctgttaagaataaatctagtgatagaatctgggtgtttcagcctgtgttgggatgctctaaatttagatacatcagagtcctttgagagcaaagcgaacaggaggaactgatacaggagctcaaaaaaaaattatttagacagttagagagggtaagagagtccttggcaaggtttccctttttattaaaaagcagccccaaaatcattgctcttctaacaaaaacgagcctaaaaaaatcgagctgcaaacatagataaacaagctggaagcttgcatgggcaaatgccagcagctgtgccaatagcaaaaggctacctgggagccaagcacattcgacatggaggctccaccttccattttctttgtcaaccacatgttcagtaaaggaacaagcaacatggtgctggccaggcagagaacccatctgcataacaaaagattaggctggagtggccagtttcttcccacgctatgcaaatggcacatctagtcctaaccagatcttcgtgcactatgcaaatggcacacctggtccaaccaatcttgtgctccctatgtaaatcagacaccacctcctcaagctcatctataaaaccaaccgcatctcgctgtgaacctaaaagacctgctcaggagcccctctctgtctgcaggaaagagagcttttctctttcttttgcctatttaacctccactcttaacctcactccttgtgtgtccacgtccttgatttccttgatgtgagacaatgaacctcaggtatttccctggacaatgatgctgcttcagaaccacaaaacatgttgaaggcagtttccttatttcaagatggcaaagtcacagtaaggcactatacctagtggtccctctcaaagtatcctagcattagaaaacagaaatggcataaaaataaatattagcatatttgtttgaaccgaagagtgaagtccgatgttttttaacaaaaagcctgatttttctaactggaaaggcaataattaattccagagcgccacagttttctacacacaaacacacacacacgataaaaatgcacttaaagtccataatataaaaatgccttcccaacctttccagagtatatggaatttaacaaggtgccctaaagtgtaaaagcaacaagtatgagtgatagtcttctgataggtccaggtaaagcctttttggtaaacttcccagaaattgagaaagtaaattattctaatgactggataacagggccttttcagaagtcaggtggtttccaattcttggctctcaacaaaattaaaggaggaccaaatctcaagttgccagcatatagagtattaaaaatattttttaatgacagatcacattagcttattgcataaaaacatttcaaagatttgagaaccactgctaaagcaattctcctttcaatctcctcaactcttctgcctgaaaaagtttaccaggggtaaatctgtggccccatcaatgccctttggatagtcatccagaggtacgtgattgaaatgaagggaaagcccagtacattttgttaaatgacatttctaataacatttttaacgtctaataattagttatcaaaaggtacaatacttatgttgctctgaaaaaatgtgtgccactaataattataatgataacccacactggaggcatttttaaaaataattagagcctcaccgttacaggaaatatttaattacatttaaatttatttgcatgatttaattgcaagggaatataatagaatgatcaaagaaaaacttccaaacacattaaacaagcaaaaattttatatgacaaattggatataaaaattcaaggagaaaacagaatgatataaaatttctgacagtttaaaaaacagacccttaatgtatttttaacattggtgatggtgggtatcaaatctctagggttttagattccaccagatgcattttaaaaagtgacataaattttattttaaaatatcaatatttacaatccaccaaaaattccatctcatgaaaacaaacatcaaacttgtgacaaaacacagataccaacttataaacagtcaaggcggtacacagttttgcaaaattcctatagcaaatatgaagtgtgaaggcccctgccctctagttcctaagcacggctgcagcttataacaggcatatactccaagttccagactcagtcatttttctggggtacccaagcgcccattgttaagttcttcttcaaatgtcttgaactctgaatttctttgtttactctttcatacttgcatcccaaccgcctaaaagtgttggttttcaaactaaaatgtcattggccaagggttagagattaattccttgctctctgagaacctgtccaagctgaatatttatcagatacaggagatcagatggggtgaactttggaccacatatagagaagccaggggtaagtttctaactaccatgaattcttagaatgacctttgataaatctaactgttaaaactaactgtcagatgcttcatgcaggttctcatctatttaaatataaataccaaagagataaggactcttactctcttgcaaaggaggcctcaagtggattaatatatacctgaaaaagcatttccagatcctagaagaaagagaggcttaacattgggacagaaaggatttctagtagtcatttattctggtgtattctctgcctcaagataaaaacaaaccaattccacagtgagtacagggggctgcactggtatttaatcataataaatggaaagtcaagagctttttaataaaaaagactctttgctaatgcagtttaggtacataccctctcaagtccttggagatggtcaataccagtccatcatgcagcctctgtcctccgacaatgaagcatctcacacacctctgaagtaccatgtgcagcgatttcaatggccccctgtgctaatccttatttcaattcattttagcatgttattttaaagcatgtggctatatccacgcacattcctacataaatacacacatatttgcaaaatctctacatgaattatcttatataattcaccaactaaatgtaaaagaaaaaatcacttgtaggtcttccaacaggaatccaaaacacatgtttacatatatgcttaacattcatttaatcatgcattcagtcacatcacatattaagttctaaatagccaaggctgaagaaagtagttctatctctcctctcacttaaaaaaaaaaaaattatatgtggaattcttagtgaatagacaaataattccttctttatttctctttcttctcttttcttcctgaacacaagaaatttctaagagaagacagaaccaagcccttgcctgtcttgttccatatcccgtgtctcagaccctgcctggcatgtggtaggcacaaaaaagttacttgttaaacaaataatgcaatagtgatccaaatacaaagggtgatgtctaaccaccacagattttagaagtgcaggacaggaaaataagttcacaatgagctgttttaaaagaagtttgtttagctcatttgtattgaaatataaattattataatgggcaaaatattactaaccacagatgaggacttgaatgagaacccatggctgggattcatttcaaagaaaaagagaactgagatctgaattctagtttccagttcagcatgttccacagcttagaagtcaccactccatcctaacaagtaaaagccgaacaaactgaaaaagcatcaactttactcagattcatcagagaagtgaggttacaaggcaaatggctaccccaaaaatggagagatggacaagtggtgatatggtttggctgtgtccccacccaaatctcatcctgaattgtagctcccataatccccacgtgtcgtgggagggacccagtgggaggtaactgaatcacaagggtgggtttttcccatgctgttctcttgacggtgaataagtctcacgagatctgatggttttataaaggggagttcccctacacatgctctcttgcctgctgccatgtaagacgtgactttgctcctcctttgccttctgccacgattgtgaggcctccccagccacgtggaactgtgagtccattaaacatctttactttataaattacccagtcttgagtatatctttattagcacatgaaaacactctaatacaggtggacacagagaatcaaaacttactggagcagaaacccaccagcagaaagttctgcaagaaccagtaccagggtaggaaaacctaaacagtaattgacaaattgccagaagctccatgtggacaagtctgagagctaaaaactccaggagtggcttttctaactcagtaagttaaacaaacactacaggaggacacagtcacaaggggaggagggggcatgcttttgtgagttttaccaccagaagtccacgttctcatgcttttgggaggcagagaggaaaagaaatcactgtgaaatatggcagggcattctgttcttgctaacaaggtttgcccttgggacaaaagattttaccagagcctaacctgcttggattacatcagagcccaacctacctggggtaaagaaaataacccaacttcagctccctgcagccatcctgtcccacactagggtgatggccagggcagggagaggacactgagaagcactgtgaagttcaacaggggcacaagctcaccaaaagactgagacctaatcataggactatagaacacttcctgtccccccacgcctcaccaccacctcactaaaggcctgtttaccacagctcctcttacccagtacatcatgaccacctttgcccaaacacttacaaggcaaactaaaaagcaaaacacagttttgaagagactgaaaaacatcagaaccagggttccataattatgtcaggaaggttggaattatcaaccagggaaattttttaaactatgattaatacactaagggcattaatggaaaaagtagacaacatgcaagaacatacagatcatgtaagcagaaagatgaaaaaatcttgaaataagtcaaaggggaagacaccttatctataaagggacaaagacaagaattacaacaactattccttagaaaccatgcaatcaagaagagcatagagtgaaacatttaaagttttaataggggggaaaaaaaaaacccggccaacctaaaatcctgtaccctgtggaactgtccttcagaaaatgaaaataaagagacaacactggaaaaggaataagtgaagataaaattttaaagtttattttctttattcttaattgatctaatagttaacagttgatatgctaggaaaggagagaaaatggaatcatataaaatgctcaattaaaaccataaaaggcagaaaaagtgtggaagacaaaaacagaaacaaagaacaagataacaagtagaaaacagtaacaaatacgataaatattaatccaactatattagtaatcactttacacatcaatggtctaaataaaccaatgaaaagacatacattttcagagtggatcaaaaaataagacccaactgtctatataaaaaaagcccagtttaaatgtaaaaacaaattatgactgaaagtaaagacctggaaaaagaaataccatgctactctaatcaaaagaaagtaggagtagctgtactgatttcagacagagtaaatgtcagaacttagaaagttgtcacagataaaagggaaaattataggccgggcgcagtggctcttgtctgtaatcccagcactttgggaggctgatgcagatggatcacctgaggtcaagagttcgagaccagcctggccaacatggcgaaactccgtctctatcacaaatacacaaaaaaattagccgggcatggtggtgggtgcctgtaatcccagctacttgggaggctgaggtaggagaattgctggaaccctgggggaggagattgcagtgagctgagatcaagccactgcactccagcttgggtgacagagcaagactccgtctcaaaaaaaaaaaaaaaaaaaaaaaaggaaaattatataacaataaagggatcaatactccaaaactacaaacattaatgtgtatggcataacaatagagagtaaatatacgtgaggtaaaaactgacagagctgaaagaacaaataaacaaatctactattagagagttgaagatttccaacactcctctatgagaaatgcacacatccagtaggcagaaaaccagtaaagacatacttaaattcaacagtactgtcaattaagggaatctgattaacacctatagactacttcatccaacaacagcaaattacacattcttttcactgtcacatggaacattcaccaagacagaccatattctgggccataaaacatcttaacaaatgtaaaggaacatgggcacagtggttcatacctataatcccagcactctgggaggctgaggtgtgagaatcgcctgaggctagaaacttgagagcagcctgggcaacatagtgtgaccctatctccacaaaaaataaaaaattaactgggtgtggtggtgcatgtatgtagtaccagctacttgggaagctgaggcaggaggactgcttgagcccaggagttggaggctgccgtgagcttatgatggtgccactgcactccagcctgggtgacagagcaggaccctgtgtcttaaaaaaaaaaaaaaaaaaaaaaaaaatggtctcctttcagaccacgatagaattaaactagaaatcaacaacagaaagataaatggaaaatcctaaaatgtttgtagattaaacaacacacttctacataacatgtggatcaaagaagaaatctcaagagaattgaagaaatattttaaactaaatgaaaatgaaaacaacacttatcaaaatttgcataatgcagtaaacacatcaaggaaatgtatagcattcaatgcgtgttagaatagatcaaaaatcaatcacctaaacttccaccttaactaaaaaaaaaaaaaagagtaaattaaatgcaaagtaagcagaaaaaaataaatactaaaaattagagcactatactagtattagaaaggtcaaaattcaaaacatgacaacacaaatgctgacaaaaatgtggagcaacaggaactcttgctcactgctggtgggaatgcaaagtggcacagtcactttgcaagacagttcggcaatttcttataaaattaaatataccctttccatacaaaccagtaatcatactgcttggtatttatgcaaatgagctgaaaacgtatgtctacacagaaacctaaacacggatgcgtacaggagctttactcataattgccaaatcgtggaagcaacccaaaagcaggtgaacggattaaaaacaaaacaaacaaacaaaaaagggtggcacatccaaacaatggaatattaatcagctctaaaaagaaatgagttattaagccatgaaaagatatggaggaatatttaatgtatattaaataagtaaaagaagccaatctaaaaaggctcatatggtatgattccacctatatgacattttagaaaaggcaaaactatggaaaaagtaaaaggatcagtgattgccaggaattagcaggtagagagggttgaacagtcagagcgcaaggtgtttttagggcagtgaaactattctttatgatgttataatgatggactacatctttatacatttgtcaaaattcatagactgtacaacaccaagagtgaaccctaaggtaaattctaaattttgagtgacaatgatgtgtcagtgtgggttcactgattgtaataaatgtgtcactgtggtgagggatggcaacaatgggggaggttgtgtacatatgggccaggaagtatatgggaactctccacacttaaagttccattttgttctttttgttttgttttgttttgagacagggtctcactccatcacccaggttggagtgcagtggttgatcacagctcactgcagcctccaaccccccaggctcaagcaatcctcctacctcagcctcctgagcagctggaactacaggcatgcaccaccatgcccagcaaattctttttttctttttttttttttttggtagagacagggtttcaccatgttgcccaggctggtcttgaactcctgggctcgagcaatcggcccaactcagcctctcaaagtgttgggattacaggcatgaaccaatgcacatggcctcagctcacttttgtttgaacctaaaactgttctaaaaataagattgattttttttttaagcaaaagttaaacactgagatggtttccatttctaccccagggtatgtgaacatagcaccttcactccgttctcacctcgtcttcccttgttcctccctcaattctcagatccaccagtgagacagaaaacataggagacaggaaaagaagaatcaaatgggaagtggaaaaaagacagggaagagacattgggcaaaaacacattctcaagttatctctactgaacgaggttttgaacagagagagctaaccatcatgaaatcttggtgcctctcaaactccactatgatgccctctggaaactttccgtctccatgagtttacaaaatttaaaaaattgacccaacaaaagccaatttttcattgaaaagcactactaataattgacatgaaagggcaacactgaaaaaattccttgatttgggaagcataaaatatgagtcctaaaatacactgtcactctgtgaagactaagcctccaggaccaatagctttctctctgatggaaagtggtcccttctagcaatataaggggttctgccccttgaccagcatattataagtgctgacacaggtatgccccaatgacatgatggtaatacgtggtaaatggtataattttgtatcatcacaatttgaatctgcctcacaatgatataatcttgaatcttccttgcagacctcaaacagaaactcacttcacatatttaaccgcaaacagcatagacatttctcttacagagagggctcattttaaaataaggatatgccttaacaagtatatttagtcataaaagccttaataaaaatatgattttaaaaatccatcacagaatgatgcaaaagcaagctgagggttcttttgacccacacactgaggccaaactacctaaagtgattactacacgtactgaattcactgtgagacagaaagtatggctaatttactacctatggttcttcagaactttccatatttattcttttttccattaaggttttttgttaatcatatcttctgaaattctgtgattacacaaacaccaaagataatgacatgacttaccttgtttcttacatatagctgcaaacatttaaacaaatatgagtccaaaattcaagaactccatggctggcctaatgttaacatgaaactaggtatgaacaacaaaaattacaaccatagctactgtcgtctattgagcacatttgatctgctaagccaggggttagcaaactaatggtccgagggtagcactctgctgcttttgtaaataaaggtttcttggacacagccatgtcccatttgaggtcttatctgcatatgctttcgttccacctccacagagatgagtcattgtgaaggatcatacagcccgcagggcctaaaatatttactatctggttcttcacagaaagtctgccaatccctcttgtaggcacagtgctaagtactttatatagattatctctttacatagattattccagtgaggtggaaatgattattatccccattttaaggaggaggaaacaggtttatcaagattgagtcacaagcagccaagccaggcttcgactcccaaaccctctaaactgccaagctacactgggtaggagcagggaggacaacataaccctaacgtcatgtaactgtactggtataaaggtaaagccttccaaagcatctgaaattaaaaaaaaaaaaaaaaaaaaaaagtaaaaggaccaagcccatttcaggaacagagagactcccacacaccctgtggaaacacttcctgaatggtgtcattatcattgatatcacagcattaccaactttcccatgataacgtcatgccacgcgctctcactacactgtgttcagagaacaaacctctcggctgactgaccgcctgcctactgactttgcattctgcccttgtcaacctattctatgtgccactaccatgccaatcccttctctaagtattgagaaagtcattacctaagagcataccgtttgttttgagttaaacagactttgatagaccaaccttagaaactagccatgaggaatatcaatactcagaggataaaaaccatatctaggttctgagaaactaagcacatcaatcatttttcagaatgccactatcttctaagacaggtttttttagcagaaaaattgttcaccattttaataggaaaagaccaaatggtaacctacaaagaataaaaagcaattctgttataaggaatccattcaggctacaagtcttcttaagtcctggacaccaaaaccgcaaaagagcatttagcttaaaacccaacggaagtcctcagaacacaaggaactttggagcaagcaggcccctctactcatcaaacttagagccacagagcacaagagcatcttaaaggctctcccaactttttataaacaggcctgctaaattttgcttaatgtgatgtttcccagacttatttgagaaaggatttctttttctctccctttacagaaccatattaatactaaaacagtccctcaacaaacatttcccaagggtctgctgtgtgacaggcactgaactaagggactggaactagaatctggggaggatacatattaaacataaaattgcaagttattaaatgaatgttagtaccccatggaagagatcgcagggactagagtagacactttgagaaatgctagtataggaaggacgctggaccaggagccagaaaactatattcccacctcaacttggaccctaactccctatgtaatcccaaagatcactaagtaaggaatgcagtgtgtgcagacctcggattctcccaactatgatatgacaaggtaggataagatcagctctaagactccatccattttgaattcattctgtgtcattaattcaatgtgaaatgagagaaacgaataagaaatttcaatacagtacttagacacttcaaaagaaatactgatggctcagataatgaaactaaactggaaaaatgtcttcagaataaatgtccagaatgtaaatgagctctgagtatttttcccgaagcaataatgaagcagtaagaactttaatggggaaattaagctctgacatgatctaatccacgctctttttccagccttggcatctccttcctccctccctgctgctccaagctcactcagtgttcccaaaagctccacctcctcaggtaatagagttttctgaactcaggccatcagaaagtccttcttgcccaatgcaggactcttaacatctatgtgtttccatggctaccctccgggtcaactctctctgaacccctcctgacatccttgctgtcaccttccaaaatatctaacctgttgaccacgcccccctttgtgaccccaccaatcctaacactggccttcagcaggccttggcacttactagctgtgtcaagtttcttacccgctccagcctctgtttcctaacatagaataacgaatttgtacattgcaggatttttatgcaattccaatgtacataaacatgtgaagtgcttagggcagtgcttggcacatagcaagcgcttatgctcaggatagcctcctgctttcccttccttccttatgaacagaaagttagttttattgaggacagcaatatactcagctgaagaaacaacttcctagccttccttgcaagcaagaagcatcatgtggcataggtctgctatgaaatataaatagaagttgctgagcggggcttaaaagaggagtaaactcaactaacatatactcctttgcccttccccatttttcctgacaaattttagatgtgatgatgtggtcacaaaaatgtctcaaaaccataagggagagaccaagagaattacatagacctcagctctggcaactatgtaccactaaacccaggccaccagcagtcagcctagttctgtagtttttggtgagggaaaaacagagacaacttctaactgccttaggatatgttttctcaggttgctcttgcagccaaatgcactccctgatccagttaactcttattaattagcacctgcaacaatttatttcattatctgtttatgtttggtttctctaccagacaaaaagagtcttattcattttcacacaacacctctcaccaagcaagtgttcgataaaagttaaatgaatgaatgaagtgacaataatgaccatcatagtttgtctccagttctttcacaagagaaaaacattactcttaagtttcagaaatatttttcttcatctcgaactgaatattcttcaaagaatttagcatttgtaaaagttcccatagagtgcctgaacctaaagttatttaacaagcactgacataagagtatttagtgtgccaggcactgctttcaaagctttcacaaagaactcattttattctcataacaacccgatgagttaggtactattatccccattttacccatcaggaagctgaagtgcagggaggttaagtcacccaaggtcatacagccagcaaccagcagagccagcactggattacatagaatttggttccagagttcatgtccttaactgatattctccaccacttctcaaccactaactgtgacagtacattctttctgtttctgtgtaaacaaggaaggagctgggagaaattcgatctgaatatctatgaagattcttggctccacagatcagccgggaaccaacgcagaggttacttggctagagtggacgttaccaaatgtacaacgaaggatgacagaaataattgtacaaggaattgtacattttaattctcttaagaacttccacagttgaagatgaggaaaatgagaggtaaaagaagaaatgatattacaagaaaagtcttttaagtggcaaatacaagtaaatgacacaaaaagctttctaatagcaagctaatcaaaatgactacctaagacccaattttcaaaaaccttttagctgtaagatattaccctggtactctgctcttgaagcaagattagaaaaattatttaaaagaactccagaaatgtgaagatgcattttcatctttctgcagcaattctcaaactagctacaagaagacattccagctgaatgattacttatactaaattctgcacaatttatctctcacacagattctgcatccagtaattatcagcaaccaggcccaattccatggtattgacagtggtatctgtcacgtcttcagacaactccactaccaagggccctgcaacaaatacaaacaggcagagcgtgttttcctatctacagtgacatctagtgttaagaaactaaaacgcagtctgtagaacaacatttattcccattactattgtatttaaatgcatattataaaacaggaatatatatatagctcttaaggtaaacagcttttcccataattgggattgccaattgtcaattgtattatactccaatatttaaaatatctcataagattaacccattgaaaagacacatttgttttgttaaagtgaagaaatcattttgttctccaatagttttgttttaaatgcaaacatatctttacttactaacagcagactggaatgtcagaggattttgcagacattaaaagacatcttgttaaatttaacaaaaagcaatctggcttaatataataataaatacaagccctttattcaaaatcaactcgcaaaatctctaaaggagaacaatttaaatgcaaatgagcccattatagaatggtttctgatttaggtatatcatgggctaaatcttgtctccaaattttacatcttaaaattagattctaaaagatgcaggatagccatattcccctcaccaaagtgaagtatcattccggttatgacaacaaaggtgtttgaatatcttttttatttatttactttttttgagacagagtctcgctctgtcgccaggctggaatgcagtggctcaatctcggctgactgcaacctccgcctcccaggttcaagtgatcctcctgcctcagcctcccgagtagctgggactacaggcgcgtgccaccacaccatgtatttttagtagagatggggtttcaccatgttggctaggatggtctcgatctcctgacctcataatccgcccgcctcagcctcccaaagtgctgggattacaggcgtgagccactgcgccgggcctggataccgtttttaaaggtaaataaggcataattaaagagcactggattagaaatgagaaaacagaatctagccctgggtctacctaaaaaattctgagaccaagttatttaatttctcttgccttcaatttccttgtgggttttttttttttctctccttaaaaaaaaaaaaaggtggggaagacagtgaggagtttagcctggattccttcctgggctccttgttctaacattctatgttctatgaagatgatgatctctaagatctctctaaaccttgctttagttatttaagccacacagtgccacagtactctgaggagaacagtgttaagacaccttaagactcaaacaacaaacaaggtttgcattgaaatcggcatagagtaaaagacctctttaagatgtttagatgatgactcctgacctgaatcaaagatgtactaaatcacatccactatgactctgcacttcctaaaccagcaagtatcatctaaagtctcttaataaagacgttcagaaatcatgttatttaagggggtttattgctaaaccaagatagtcataaacattctgggtaagtgaggatttgccaacagagtaagttttaggtctttgtttaggttacagggaatgtttgctgaaaagttttctaagatgaagaaagaactctaaataattcaaaatatgcctggcgttttctactataattatggttattactctcttacttggcaggaagaactttgacctggctgaagagaaacagctatggcttagaggtaacagctacaaagagataaaagggggaggaagcagagcagcagaatgagtagtcaaactcaacaaggaagagagaaaggaaatgaagcaagcagaacccaaaagactcaccacagctgggatggctccagaccacggcaatggaataccccgaggacctcagaaggtaccgatgggcatctgcgacaagtggtgactgtgtgagtgacagctctccaagatgactgggatggcaagtttatgcaaaactgaagtggagtgaacaggagagagctggaggagtgcccagaggctgaggatattaaatactgggacaattcacctgatgacaagggtcagagggcaaatcatttgaaaatgatgcaaattaaaactaacagaaaattttttccataccttcaggaaattcaaaatagaaccataacgtgatacaactagatacccactagagtgcataacatgaaaaggacaaaaaacagtgaatgtcatgaggatgtagaccaaccgggctgcagggcaggtgggaatgcaaatggtatgaccacgttggaaaactattttcagtatctactaaagctaaacatgtaatagtccccctttatccacggctttactttccaaggtttcagttacccaccattaactgtggtccaaaaatattaaatggaaaattctaggcagaaacaattcaaaagtttaaaattcatactgttctcagtcgcatgatgaactctctcaccttctcgcccaggacacaaatcacccttcttccagcatatccatgctgtatttccccccagactattagtagacagttaccagatcaacaggtgtaccatttgtattcaagtcacccttattttaattgttcatggccccaaagcacaagagtaatgatgcaggtatattgttataattgtttaactatcagctattgttgttaatctcttactgtgcctaatttataaatgaagcattatcatatgtttatgcatagtatacatagggctcagtactatccaaggattcaggcattcactaggggtcttgaaatgtatcccctgtggataaggggggactattgtacacctactcaataacccagcaattctacttccaagtatacacctaacagaaacatgtgcatacattcaccaaagacatgtctaagaagattcatggcagcacgatttctaacagcccaaaacagaaaacgagtacaatgaataaactatggtatagccacattgtgttatacaactatgtacaaagacataagtagatctcataaacataatatggaacaaatatggtacacatacaccatggaatactatgcagccataaaaaggagcaacatcaggtcctttgcagggacatggatggagctggaagccattattctcaacaaactaatgcaggaacagaaaaccaaatactgcatgttctcacttacaagtgggagttgaacaatgtgaatataaagaagacacagggagtggaacaacacacgctggggactggaggcggcggatggggcagggggagggagagcatcaggaaaaatagctaccgaatgcggggcttaatacctaggtgatgggttgataggtgcagccaatcaccacagcagatgtttacctatgtaacaaacctgcatgtcctgcacatgtacctcagaactttaaaaaaaaattaatattgaataaataaggccaaacaaaaaaatatacagttgtgcactacataacgtttcagtcagcaatggaccacacatgcaatggtggtaccataagattatagtaaccccgtatttttactgtacctttcctatgtttagatacataaatacttaccattgtgtgccaactgcctacagtgttcaatagagtaacatgctctacaggtttgtagcctaggagcaataggccataccatatagcctaggtgtatagcaggccataccatctaggtctgtgtaagtcactctatgatgtttgcacaatgagaaagttgcctaatgacacgtttcttagaacacatcattgacaccaagccacatgtgactgtgctctgtacattccatgtggataaagttcaaagcagactaaacaacactaagctttcagacctcaggctagacgtctcccttggagggaggaggagtactgccagaaggggacatggcagggactccttcggggctaataatgtgtttttcttcacctggttgctggaggtatgggtgtgcttagttcctgaaaatctgccaagcagtactcatgatttgcataatattctgtatagatgtaatatataatgcccagatagaggctgggctccaagggcatattcaaaaaggaagagtattccaaaacaaaaacccagaaacaagggacaaaaagaaagccctcattgaagacctttcataacagagaaacacagcagggtcctcgcacccaagacatgggccctctatacagcctcctaaggaagaatccgagtctttcttagacagaagaaatcctcaagagttcacctagatcagcctacccacttgtgattgaaaaaactgagaccaagagagagaatataacttagtcaaagtcacacaactagtaagtgataggtccaagggcaaaatccaggtcacctcagtaaacaagacttaaataatgataaaatactcaagatatgtcaaaagaataaattaagtgaaaactcagaatgagtaggaactcaaaaaaggacaaggcttttgtgtatttcattcaaatgagataagcagtgaagaggtgacacaatgcacagaacaaccgcagagaggaggaaagagctaggaagctggcaatgtctacacatcttaatctgggtgtgggttagatgggggtacacagaagtaaaaattcatgagctgcatataccatctcttcacactttgtgtatgttaaatctcaatcaaaaaccaattcaaatagtttttttttaattctgtgaacaaataactgcatttaacaaaatgaatctattcagttaaaatttcttttcaaatggcatcacccagtgtctccaaatgcttgtatgagtgtacaacttgggggctgcaaaacattccaagttatatgaaccatttgattctatgaacctacaaccatgcaataaacatggagagatgtgtttgaagggatgatcttccacatgctttagggctgtgctttccaactcttctgaggctcaggacactttcgtcaaaaatagagatttgggggtatcactcctattcattctcctttcacgtgtctgcggtaggctgagaaaactgtctttttaaaaagatccccagtgattctgagtggaaaccacttctgtatggaagtggtttcaagacaggttctcactctgtcgccctggctggagtacagtgagcaatcacagctcgctgcagtctcaaccttccaggctcaagcagtcctcctgcctcagcctcccaagtagctgggactacaggcgtatgccacctgtctggttaattttttttctgtagagacagggtctctctatgttgcccaggctggtctcaaactcctggcctcaagcaatcctcctacctcagcctcccaaagtgctgggattaaaggcgtgagctaccacacctgtccaaaagtcaacttctgaggtggagaataactgctatatgtggttttggatgagaaataggacttagcaacctaaagaagtgtcacgtcaaattctgttgcttgacttccatcaaatctgctgggaatgccagcacactttcactctaattacgagaacaaaaaaggcttaaatgtataatgtactggacctagaggaaaatgaccatcttttgtgatgtctgtgtggctaaattctttcagggagaattcagagctatttggaaccaactcctctcatccatttgacaaagacaacttaggaaggctggttttagctggaaaagtttcacatcaaagaggacaggttcagagtaaacaaaattaataaggaaaaaatggatgacattactgtaatgctgactgtgtgctagacaccactgtcagcactttgcctgtcctcgtttctcactttgtatgataggtacgattactgtctgcatcttacagtgaggttctggggaacagaaagtgacctgtgaccatggtcagaaagatgacaatgctggatccagaataacaaaggtgacatgtaaagtacgagataagatgtgagaagtgtatagtcatcttcctccttggaaatatcagaatatcctggtaatagacatccacatgcaacttaggcccttattcttttgtcagtagatgcccatttgctaattatgctgattagcataatctgatccttacagatacaaacttcttaataccaccacttctgcttggagctctgctgcctggagttaagagaaactgctgtcatccttaaataatgcaaaggcaaaatcaaccaggatgctaaggaaaaagtaatctctgaaaactggctgttgtgatacaaacggagggcaagtccaacctgccgctcctagtaactgttgctaggtaggctgggatggaaaacagcaagctaaagaggtcaatgagaaattgagccaaattcaaaactacctatgaaagactgaagagaacacacccgcatttggagctcattttaaatcatgtaatcaatctaaaggagaaaaggaaaatgactttaaatacacagaatttgttgtgtgccattcttcagttctaacaccagaaaacagagggctctcctgtaatggaatgttcacaccacagtacagatattcagctgcttttatgtaatttttcacctcaatacaggattcctgagtcataaatattttctcttaagaagtaaaagaatgcctcaactcatgtgcatctcctgtttgccttgaatatatatgacactatagtaagtgtccaagttctatatttatggtaggaaatgtgaatggtgtcaccctgattcacctgctcccccaaccccagctcacagaagctgtggtgaatgagcttgacctcactccaaagggctccagaggtggcccttgattcatctcaatcaatcagggtaacctatcccttatcacactgattggtttagataacctagacctaagccagtcagcatacagtgtctccttggccccagagactggttcagaaatgcaccattcaatggagagctcaaaaagttgttgggaactcaggaatgcacactccttgaatttgggtaatgcgttagggagatatgaatctgtaattgctgctctccctttgcattctgagggtagacagcctgaggagtaagtcagtacaccaaaaagtagaaccaaggagaatcctggtgagccagagccctgatcaaaccatgcctaaactccatcccaccatcactcttctgtgagctaataaacccctgtaccatataatccagtttggaattgggttttctgttattcaatgtaaataaacaaacagaaaattgtagctacctgataaaatacgtctaagtaacaccagcttgtatctgtataaaactacataccttaaaaagtttccatatacataatttcatttcttttctgcccagctgagaagataggtattactggtaacccagttttacatcaaaaaggatagattcagagtaaacaaaattaataagagaaaatggaacacatgctgtaatgctcacagtgctgaccatgtgctggacactgccctcagcctctgtgtgtttcctttctccccttatataacaggaactactattgttggcatcttgcagtgaggttctgagaaacagaaagtgagtggtgaccaacgtcagaaaaatcataaattattgatccagagtaacacacaggcaaaagtcactagtctaggcaaggagaaaaccatctccttgctccctggctcactattgctccaccaaccaccccctcctctccaagctcacaagacgtagaaatcctccaaggtgagttaaatgtgttcctgggtgacataaacaatcaacttatctatgtcatgaaattgtgtttttttaagcttcttagccaactaaaccaagttcctacaatgcagcatccgctgagtacaagtgtacataaagcacacttccatatgaccaatcttttcctctctgaccgtagcaataaatacgcagtcagagcccatcagcgcacatgcctcgccgcaaaagatcagaaggaaaatcccttatgcattcaagataatttatggcatggcaccaacatttaacatggtgcacatgaattatttctgagcctttttgctccagaaatgttattcaaaagtaagaaccagcatatacttggaatacctttatttatgagcagccccttcaagatgagaactgcaatggaaaatatggtaggtttggcatcagtaacaacatcagagctggttatgggaatagctcagctcagcctctgaccctgccaagtgcaatagcactgacagtcatctccccctgttaattatcaagtcccagttgcagagaacaatgaactttctttattactttgcctttcatcttaaaatacagttgcaagagcagaactttagaaaaggaagaacacagtttgacagaaattagcagccagagtctaactttaatgagaggttgacaaattaacaactgcatactatataaagtacagtaacgtattttttctcttgttttaagaacaaggaagagccaatgagatagtatatgtaaatgcattagaaaaagataaaaggctttgcgtgtgatggtactggtggtggcttttgttcaaaccgactcaaaatcatccacgctagtctgcaaattaaagcagagagacaaatgatatctcaaaatcctctctcaagtcatcttcattgcaacccctgatcccaaatccttcttcctttcaatactctcttctataggaagacaggaacatacactcatacatacacagttgcaaaccactggggctagcagaaggcaaaggggcaagtaaaatagagaaaaaaggatgctcgtggcagatttttttgcaaaaaatgacaagaattattgatctgcctgtactcattcctttgggtattccccactcctacactgtggttgtacccatgactacctttagccaatgaggcattagcaaatgagatgcaactgaaagcctgaaaaatgcttggacactggggttatcctttcttgccattcttaggatccagagaccaccatgtaaaggcctaaactgatggggatgagggacacaagaccaaatcatccccagctgacatcaagccaaccaccagccatgtgagtccatcttggaccattcaactccagggcatgagtgaaggcaggagaaatccaccaaaccaggctggtccacaaaattaagagaaataatcacagtctgtttaagccactaggttttaaggcagtttgttctatagaaaaaaacctcaaacttgacctgaaacttctcaaaaatgggagaacaagctgagttcaataattattcatggaacacttcctatttataaagagctactgcacaagacactagaatttttaagagattcgaagatgagcaaaatgttttccctgacctaaaggaatttataatttaactgagagaatgacaaacatatggatagttacaacacatgaaggatcaaatatcatcccctcccatctccaggaacagctgtcattccatgtatgaactcattcctccaaacaacttctgcagtaatgtacagccacactgggcctttaaaaccaaccattcagtgttcagacctactgagcaataaacaaaagagacagaaactgtgtcctcatggactttatatcctaatggatgtcaatttacaaaatactttctatattgcaagggcttttcaaagtgctttaagtgtatgtgtgcagacatgcacgtgtatataagcatgtctccacacatacacacatatatatacacatatatatacacacatatatatacatatatatgtgtatataaattcacttagcataagttatctttgtaagtaaatttaactaataatagaactgaaaaaaatcttatttattttatataatctcaagcttcaaatatcagagattctgggagcagaactctgatattgctttatcaacaaaagtattttaggcccgttttgttagaaatcagaggacgagactagatgagactatgggagctttacagaagaatacccaattgtggggaaaagtcttctagcacttctagaatgtaatctccatgagagcagggattctttgttttgctcactgggtataccttgtgtccagaactaggtctaccacataagatgctctcaataaacatgtgcttaatgaaggagggagaaaggaagggagggataaagggagggaagctgggaaagaaattctattatggggagaatattttcaaactcatagtaatgctaggaatttccttctgaacataggtagcaatcctagttaattggaacgttagcatgtcaaaggatgcccaccacctctcatctcttcttcgcccaaaagttttcaaaagtttgaaaatagttttttaaaattacaaaaataaatcttacaggaaatttactgagatcctacaggcatgacctacacatggactgcactaatccacaggagctgaactatacggactcgatttttacaatgaaaaccaaaggggaaagagcactgacttctcaaattaccactgcagccaatttctgcctggatgaacacttggaaactcaatatattatcgtcacatagccaaatgagctctcgagtcagtactttctatctttagaatggcgataactaactataaacaatatgtgtgattatctgaggtcagaagcatcaaatgcccaaagagttgctggtaaggaagctggtaacccatggctgaaagaaatgtctcctccttcatctaaaatctaggagaaatcgatgaccataaataaaattatcccccagatctactcctaggttcaacgtttgtaccaagaagaggtcaagattaactgcatttaggccaggcaccatggctcacacctataatctcagcagtttgggaggctgaggtgggtggatcacagggtcaggagattgagatcatcttggctaacacggtgaaaccccatctctactaaaaatacaaaaaattagctgggcgtggtggtgggtgcctgtattcccagctacttgggaggctgaggcaggagaatggcatgaatccggaggcggagcttgcagtgagccaagatcgcgccactgcactccagcctgggtgacagatcgagactccatctcaaaaaaaaaaagattaactgcatttaaacgagagaggccacaaaaaatgttgtctctcccatgctttgtctgtaggttttccagaaaccagaggattcagtgccctggacaacaggaatccagaggaccgcaggaaacttgttccacaaacctgacccgcctacaagcctgctgagcaacagccccagttacgagagctgcttccgaatccattacactcccaatacacatcttctccacaaaatggaaaactgcaggcagccagagaaaaaaatcttttataggttgccataatgttctggagacaaaaagttcagtggattgattctattataaaacagatataagctggttgaaagcatgcctccccatgaaatttaaactcagaacatcttaagccggaaaagaatcccaatttcattttactatatttcttgttagtcaaaacattttgaaagggttacaagttatctttcatcattgtgctatccacccctgccatggccctgtagtatcctgcctctcctactcccccagagaaggaatatcaagacgccagctcaatttaaacttcagtcatttacattaggatcccatcatcacatggattcaaatatgctccatcctccaaattcagttttcgacaaacattaattgttaagtgtgtaagacaccaaataattccacataattaaagtctaaataaaacaacttcaatccaacttatacaaattgctcactttccaaggaaaagcctctccagctaggcatctgcatgtgagcgcctgcttctcctctcccacccgctgccacaccacagtcaaaagccctgtgcaggcaatgaaaacaccaaagccagccggacattggagccatcaaaggatacgttttcagcaaaaacaaaagggaccttattgattaaaaaatgagaagaataaccaatgctggaaggattcaaacagcaccctcagggctgcgaggaccactttgcagctctgctctggacagacactcacagaggcagctctcccttctgccgcaccatctgtcaaagggctgccagcttggcgctgcagtccaaactgtctgtgcgttattttgaagcacagagctcaaggagttatttggaagccagatgacataccttgagcatttttctttaattgttcataaaacgctggaacagagaaaccaaaacgtatgcaggacagataaacccaaaagggcataaagactggggtggggaaggagaacacaggaatggagaaaaaactggggattcctcctcttaaaggatcacttcaaaaaaatcattagcaataaaacataggggacttgtaaaagccaagcctacaggtacacagggcagggggattgagtagtcactttgtaaaccacttcaaacaccaggcagtcagcacaatattgtagccacgcaaaagggaaaccgatatgaagggtctcaagaatccattgatgtcaaggctggatttatcacaacactaacttcccagttccaagagaatcactgcagtttgagataaatttagccaggatgaaaatcacactgaggcagcattctaacaaagagaccagaaaaacccaagaagagagcttcctatgtgaatggagcagattctgaagtgctggcagtgcagtccagagcctgcatgtggaacacacttgggtatcaaatgtatcagacaaagcctaaccacgaaacagaaactgtttcagtatttaaatccaagggactttaatacaaagaattggttacttagctgaaggaacagctggaaagccattaggaacagtaaggccacccacaaactggcaacagcagagaccagcatcaccctaggcaggaggggcaaaggcatgagggagtatttcccgagggcaaggctatgtcacctggcagaactgctaccacaatgggctggtccttgctgcaggagctggggccttggagaagaggtacctgctgctggggatgctaggcgaggctgaagggggagggcctggtttctctctccaatctccacagggatccaggagcccagaaaagggcggcccacaggggtcagcccacgagacagggcagaacaggagaaggagaagaacagatatgaggacaaggaagcctaagactactctgcatttcctcagtgtgtctaaatcaacactgtcaccccagcactttgggaggccaaggcaggagaattgcttgagcccaggaattcaagaccagcctggccaatgtggtaaaaccccatctttataaaaaatacaaaacttagtcaggcatggtggcacatgcctgtaatcccagctacctgggaggctgaggtgggaggatcactttagcccaggaagttgagactgcagtgagccaagatcgcaccactgcactccagcctgggtgacagagtaaaatcctgtctcaaaaaaaaaaaaaaaattcagcactcaaacttgaaggtacagacccgtcccctggggatcttataaaatacggattctgatccaggaggtctggagctgggcttgagggcctgcgtttctaaccagctccccggtgatgttgatgctgctatccatgctatgctctaaacagcaaggatctaacggatccaaatgaaggactgagctgtacttcagccatattccctccgagaataaaaatgcacaatcatacaagagcctttctagtgggaatgagaaagtaagaagaaaaacatagcgaagagcatcactgggacaggaccgccgcctgcacaacactccctgtcactctgcccactaggtcatcagatttgtatggctcagggctgttgttataggctggattacgacaccctaaaattcatgttgaagccttaacccctagtacctcagaatgtgaccgtatttggagacagagcctttcattaagttaaaattaattaattaaggggattaaaatgaggttattaggatgggtcctaatccaatctgactggtgtccttataagaagagggcatggtggctcacgcctgcaacactttggaggctgaggcaggtggatcacctgagatcaggagttcgagaacagcctggacaacatggtgaaaccccatctctactaaaaagacaaaaaatagccaggcatggtggtggacacctgtaatcccagctactcaggaggctgaggtatgagaatcgcttgaaactgggaggtagaggttgcagtgagccgaaatcacaccattgcactccagcctgggcaacaaaagcacaactccatctcaaaaataaaatttagaaaaacacacaaaaaagaagaggaacctaggatacacacagggagaccaagttgcaggcacaaaaaacaaggccatatgaagacacagacaagagaggaccatctgcaagccaaggatgggggcctcaggagaagttaatctgccagcaccttgatcttggacttccagcctccagaattgtgagcaaataaaagtctgttttttaagccatccagtctgtggtattttgttttggcagccctagcagattaatacaaaggtttttatttttgtttcttgatactaacctaatcccatacattctcaccgcatgcctgctctgtgagaagcagagtgctaggagctggctcgcggaatgataatgagacagtccttggccagatcctgctcctgtttttctgtgtgtaagagttggcagaaagaggaagaaaccaataccacctaactcagaggacaaagaatcctgtggcagaagcaaaaccaaatactgcagaagcacaaaggaaaagaaaattcatcctaactgggaagtaggggagaagaggagtgatcgggggaggcgggcttcaagatggattttgctagaggaacggaaaggggacacatcctgaatgaaggagtaacacaggcaaagaccacaagacaccaggaaacccaaagccccggtgcacacaccaaccagcagcagggcctctggcagggcggggactccaggggtggtgggcacagaaagaactgtgctaggacagatgataccgacaaggagattagtgcctgtaggggccaggcaaagaagtctggactttagaaaatgaaaagtaataaaaatgaggaaggcagactaaggggcaagagagtggagacatagagtacagtacagaggataataaaactctctctcattacctaactgtctaagacctgcctcattaagataaacacatgttctactgtcaactactttcaaaataactcagaacttaatgatgtcttcctctgttaacttggatataaggaagaggttgccatccgctgtgatttccaagctgggaagtagggtacgtggcagttatggatgagtgccatgacccagtgagtcagaaagagaactgaagactaacatccaagttctgagttctgcagatcaaagcccaaggctccagccacgatgaccatgttgccaccagctctgctgcagtcagtgcctgctgtcagagctcacacccaccccacagtctttcacttcccctccaccttcattcaacaggaccgtggattccactcacgcagggcaagggaagccaccgactaggtagagaaagaagggaacaaagtcactccctgcttttgagtatccaagagcttaggatctggtgatttccagggaaatttaaggaactttcaagagcaattctgacttcaatggaccttctccccacccactgacttcagcctcctgcccaccatgagagggggtttgtacagccactcctcaggatatatgccaataaaccaacctcatggctcataactcaaacagggaatatgagcacacagctcaggaaactgccactgagttggggtgggttttatgcgcattactggaacaatgactgactgatgtaaaacgctaacagcagaaatacgggaaaggatacagatacaaacccatcaactaacaatcaatttctaaagaatgtcttcataaaaacatttgagtagctctcctcttcaccttagtcttcaggcactgtcttccaataagagtttaaggcagcccttaaaatatcaaacacgagcagaaaatgactacaggtttaaagcacaaatactagcagaaaagtctaaaacaggcttataagatcgagaaagggaaaaacattgaaatagcattctcctttctcataaagtttaacacctagcatgcatcacatttttcccttctcctatgaaaagtcataaaaaagaaaatagttagacttattttttaaaaaagcattggaattggaggagaatttaacttcaggacccaaaatcaccttctgagaaaaagcataagaaaaagttcaggctgtcatagttctcggtgtggataccctttacagaaacattataaaagccctactacattgacatggagggacgctgccgcagcagcagaagagacggagcttccatcttttcacctcttgcagcattgcctcctgtgctaatgggcactatgtatactaaggacttttcaaatagctaacggtttgatttctttttttttccttaagtaaagtagattttagtcctccctctttgacaaatttccagagcaacattacatggtgcatgaaaagtcaaatgacttgggcttcaggggctgaggcaccaacacctcttacagggaatgcaacttaaacaacaacaaagtcacatatttggtgaacttattccacatctgactattctgaaatatgaacgaagtatttgctcagtttcctgcacaaaaatctctcaacaaagaaaatactgcagaagtacctcaaaataatatgacattatcattgtaatcaggagaagagaaaagtctgaatgcagaaaccctcacttgttgcagtacataagaagctggaaaggccatctctaggaccatcacaacctaccaccatctaaacttaagcacaacctctgatctcatgagatacaatctttctaacacctggtcaagccaagttgcctaaatggtgcaaggagaacattacataatataatgctgagcctgcattctgaaacagttgtcagatgcagaactcacctgcaaatccaaggctgcagaagtttaccctgtgaaacagtaattaggtgtgccattctcacatgaaggtgatccaccttaggattctgccaagacattctgccaagactcatctatctggtctcatcaatatcagatggagatttttgttctttgggaaagttttacctcaacagatgtcaaaaacaaacctcacattgaatagcctctgaattcttttctcttgtgcacaaagtcagccagataccatcaaagcacaaaactcaaatttgtgtctcaaacctggtatggctgactctcaacagatgacagaggttgtctgccaactcagcaaaaaatgagaacaaaaagaaacttgtattttgaagcattatgataaatggaggctactgctgacatcttttcacagcaagtcttgccagaaacacaggccatcccagtctagtccttgagacatgcagaaaaatattttgataggaaattactagctttgaaatttctgaaatctagccgtgctttgcaagcatattctataatattgccacgggaaatatttttttcatttaatatgttgctttgatattggctttaacaaaagcagaaaaacaaagtgaatatccttgaatattaaatagagttctaatatgtgctgagtcaaaaatggaaaaacccctaaaagtaaaggcaaacatcttaaatatcaatataacctgtacatattaaaacacacagctataatatctaatagccttctttctcactcttcaaaatcaaaccagaactcccatcccatgaaagtcactaattggttccagtgatcttaccttaacaaagtatacaactgccatgtttggagattaaaaaaaaaaaaaaaagttttaccagtttaatccaccatagtaagactaaacacatttttctagtccttactttcaaaatattttgggtttcattccacttatttgtccattccttggtcaattcttgaacctgaaaagaaaaatatacatacgtgactgcttcataaagaaagtttataattttcttctagtttccgaactctaatatctcatggaaagatgtactataattttttaaatgagatcgcgacttttacccctgaaagaaccatcaccaaagataaatcaaacaagctgatttattcctacaacctacattagggcaaaggaaagaacagacagaaatttgtcaatttgcctagaatttcacaactgcctttttcatggtgtacttaaagcagctcccttggattattaaccaaaattacaagtttgaagatgacaacgtcccattaaatggattaatttttcattattatacatcaggtcctaaaaaatagtgatttatttttatttctaattagatgtgattaaatcaccttggatgctgtagttttactttaggagataatttgcttttgtagctaattaacagggcttataaacctcattctatctttttttgttgttgataaaaaaagaaaaaaaggtggttctttaaacgactcttagtaaaagcaaaaatcttttgacaaaaatcacttctttccagttggctctaacttaggggagtaaacacgctcaaccgctgaacacagcacagttggaaattgcttctcaaagttaatggtaatgttttgttagttccctaaaactttttaaatgatcctaggattcaacaggaaacaaaaagtgatatttgagaggtagaaaaaatatgaatgaaaaatgcgttctgtggaaaggaagagccaaggtctataggagagtagcttcagaaaggggagaactcatcctttccaagccttttcctttcagcacctttatcattcctgccacctcctcactcccagcagcagacaccctcccattaaagttacctggtctccccagtaagtttccctatttaatcaggccaaaataaatgcacagaatacatctgcctgtactctcactgctaagataaactgattttctatatgccattaagcatagtaactggaaagggtattcaaggcagcaaacttaatgaaagaaagcatcagttattgacaaatatctgcagtgatggtttatccaagaggaaaaccaaaatatatctcattcacctatagtcaatcattcaggggtcctcaatttacctcaaataagactgtgggaattctaggttaacttaaagaaaataataatgttgcttcttttactacttattagtgccaaaatctatcaccttcttgatgaaaaacaaatgaaataggaggaagaggctccctaactctgtgctttgcttgttttcttgttgttgttgtctttggttttgttttttagagatggggtctcacactgttgcctgggttggagtgcggtggcgtaatcacggctcaccatagcctctacctcccagagtttgagtgatccttccaccttagactcctgggtagctgggactacaggtgcacaccaccacgcccagctaatttttgtattttttgtaaagaggaggtctcatcatgtcacccaggctggtcttgagctcctgggctcaggcgatcctcctgcctcaacctcccaagatgctgagattacaggtgtgagccactgcacctggcctgctcgttttcactggtgtggtaagactgtcctgatttatcttaaaccagttctacactccagtccttcatttcatcacttgagtgataccaaccctacagactcctgatagcaacaaaagtcatgtgactctcctggctttttgttttgaaaaagctttcagagaaggaatattcttatgccttctctccctacagatggggaaaagactggtgtactgaattactaatttatactcatcagttaacagattgtcattggcaatttatgtgagaacacaaagcatccaacaataaatgattctgcatttcaccaacagatagtttctcatcgaagaaatgtgagcaaatcaatcctgtttgaattcaagcaattctagcttagaaaaagtaagcatgccttggatttattttactgttgcatttaaacgaaataatatccatttaaaacattaatttaagaatgcaaacatgtgctactacttctaacagtgggatcaggtgatgagatttatatccaagcaaattgcaaacaattaaaatgggtcagcaaaaaactagatgataatttagaaaatgttaagaacaagataggcagtcatttctgtcacagcatgtataatacatccaaattaatacgtttattagtttccaataacttatttggtattcatgaaaactattgttaagaaacaatttaagactatatccagatatagtttaaattatagcactcaaaattagaatttgaagcactaataaataaaatttcatttaaaaaatagggattaagaaattaatgttttactgaggctattatcaggatattcatcagcataattatcctagatgtgtcaacaagttcctaactacaccccaatttttatcttccataatgtgtattcttgaaaaagcttttacaaacagaatccaattctttttcaatctgtcttagccattcagcaccatgaacaaaattgactccaaaagttgttctaatgtctgtttctcttttcacagaagtttaaaaaaaaaaaagtatagaaccaggtcagccataaaactggtttttcaaaggcatgggcacacacattggctttagcccataacagctccagatctcttctctctttggttactcactgccagtctctcccatctcaaatctcatctagcttcacagaaactaagcacctaactagagtaatcagagattcctcaagtgccactcttcccactgggaacaacaaaaagctaaagggtggtcattgttgaggccatggggaccactactgtttcatgaatgttgaacacagactccctcaaacagggactccagtcagctctgatgacctgagcagcctcactgctttgcaggatctgcatatccatttaactaaccatcatgtgccagacaaatcccgtttattaaaccacagagaatgtgctgcaatacataaaatgtcagctatcgtgcttcttcaaaaatgatcaccaacgagggaggaggctaagtgcaataaagaaaaagaaggcatctcaaacggcaagtcctaaaaaagcatgcacttaaaataatagtaaaagttatgatttaaaaatataagtcaaagtatcacttactcttgcttcattctgctgaagtttttcctccatacttaaagctgtgggggagtctaagagggcaatctacaatataaaccataaaagaaatcagcaattaataaacagcaataatctaggtttttccctgaatatagtaaattatccaaaatttcacagaaactattaaaggtaaaaagcaatgtcctacaccctgccaaaaagtgttgaatatcaccaagtctttactccacgggatacatctctcataatattcaaaaccatggcatcccagtaaacctacatttgcaatacaaatcagcaaagcaaaagatgtaacatattgacattttaccaaaatcaaacacagtctaaatccctagatcttaaggattcgcctcttttaatatgtacagagtccaacattcaaaagggaccatgcctaagtcttgcttaaccgcaggcttctgagatttgctcttactgatacatgaaaatgaaacgcatttattttcactgctgatggtataccccatatggcatggctacacgacaatctctgattacatttccttatccctgtcgaagaagtgtaaagattgatgtgagaatgataaataccaaaatcagtttaaaactgagcaggacaagcagacagagacaagagagggaaacggaatcaggctggggcttaaactgcactcttaacatgtgagtccctgacctgagtggcagggacactgtgcttcctattctgcctccttttctcatggcctaagatatcccttggaagaaaaaagaaagagaatatccctcctatcctacccgcaggcaatcactttttcccaatttggttgtgtaaacttacagttactctggtcatatgcaagcgtgttttttgtcgtgtttttaaatataagtggcataaaaacactattctggacattgcctttttaacacaccaatatatcttagagaaaattcagtaaaaataaaaaactgcttcactctttttaacaattccaatttaattatacaatattccattgtatagatttctatgattcatgttagtgctctcctattaacataaatgtggtattcttaatctttcaggaggactatccttatgcccactgcctacagtatgcatggctctatgaatagaataaattcctagaagaagaatttgtgagtcatctatacgtatggtttttattttttataattgccaagttgtcttccccagagactgtagcatttttttaatgactatttacttttcaatttctcatcaaacaaaaacacccacaaggtgatcttcttcggcactgttaaacattcaaactatgaagactaccatgggccacacctggtatctgtatactgaacgaaagcagagctggccagaaaggagcataagcgttcgtcttggtaggcaaggtcctcgtgacagtctatgcagtagtcctcagagatgtccccgagctattgtctttggccttcctgagtaaccattcatacgtgaggggtcgagattcacataggcgtctgtgggacccaccctggttagaagcccacacccacagaacccagcatctctttcaaaaatgccaaaggcacatcctccaggggccccacaagggacacaccctgttacaagagtcactgtcctccaggaaacccagagctatggtttctcagctgatattaatagtacatatgtagttcatcctaatccagatgtaattcaccagttaggggtcattttcgtcattagggatgttgcctagttagacaggtgtcatcccacttttatctggtttgcatagaatgaagccagaaagttaacccaaggtcaaatccatcctcagtaaagaaaagggagctttgttagcatgttactacaatgcatcattgcatctaacatgttgtcttgcacagagatggtacttaataaatatttttcattgaagacatgaaagtggcagatgttagtattactgcattgtttatatgtggttgacaattttcaaaacaaatagaaagccctttataacgtgggtaattttacagaatccattgttgagacttttattgataatcaaagctgaaacagttctgccacatcatcaagtcaggagacaatcacggactgaatagaagcacaaagactcatgaccagcaccccttctggaacattatttttaagcacgtgtaaagaacgaccttcctaaatccttttaaaagaaatcattggtaaaagtaccattttcaattaaattactatttgcaaggtgtatctttagaagaaaagtgtttcaaatcaaataataatcagattaagttcatacgttgttaaatcaaaagtaacactacctcaaaaacactattacaaaagggtagtaatagcagttctactaacaacttatacaagcaccccttgcctcacaccctcatcaatatactgtataatcaattttgttctttgcccaacaggtgaaaaggacatcctgtttttaaagaactttgaggtatcatctacatgcagccaaatacataaatctaaggtccactgcttgatgtacccacgaacatgtatacgtatacccatttcactattcttaaaatctgcatttattgtatttcaatgacattgaatatactttcacatgtacagaaagcatttgaaactctatttctatggattgtgttcacgtcctttgccccctttcctgctgtgttatgatgttgtcttatgttttcaatgaacctcctttcctaacataaaaggtagtcttttgttgcatgatcagcaatcttttccctggtctgtattggttagagcaaattttcattatgttatataaatatgctatgttcttacttttgtctatgtgagctttcacagaatgagaaagaagagttaaaattttctgtgacaaatgtgtgtggctttgtctcctgctatttcgaacagttttgttgtttttttcaattacgaaagttgatatcatgtctgattttaattgttagttgcaccctttgtcgtgataaagtgctcttttttaaagctcacacaatgctgtttctgcaccgctttctttcctcttgaattcactggtttgtccattcttacaaacaccatataattgagttttactttgtgaccctatctgagatgtgtcttctttaaaagtttacacatgatacttttattatttaaaatttatctttaacctcagctacaagagtgagtaattcattctactttcatcttccctttcccatcatcttctttgcttcccacctttggttgtgtttttcatttctatactgtttgatttacttgttgtctccagatacattcaagagagatgaggaagtcaagagacattttctctctgccaaattaaatgcagaaatagctgaaaatacatttaaatataataaaagagaataaaacctttaaaaaagaagatattcaaatactcagcttcatcaatcgcctgagaagcacaaagtaaaattattctatgattctggtatatatccattaggatggttacaatgaaaactgtacattatcaagtgttgcaataccaagaattgaaccagcacttttatacactgatggtggtctattaactggcacaactacttttatacaccaagaattgaattcttggttcaataccaagaattgaattcttggttcaataccaagaattgaattcttggttcaataccaagaattgaattcttggttcaataccaagaatttaaccggcacttctatacactgatggtggtctattaactggcacaactacttttagaaaattgcttggcaatatctactaaaactgaacatatgtactcctctgactcaccaattccacttgtagacataaatctaacagaaatgtatccatatgttcactaaaaacatctagaggaaagtctacaaagcagtaacagcccgaaataggaaacccctcaaatgcccatctaaagtacaatggacaaatgagctggaatatctttgcatgatggaagacaactttgcagtgaggataaatggatccactactacatgcaacagcatgggtgactctcacaaacataatgttgactgaaagaagtgagatcaaaagagtgaatatttttcattatttcatttatataaagaacaaaaacaggcaaaaataaaaactaacaaagcctgtagaggtcaggagagtggctaccctggagagaaaggggagtagttcctgaaaagaaggattaaggggggcttcaaggatactggtactgtactgtctcttaagaagcaggttagatgggtgaatttagcttatgaaaactcactgaactatacacatataacttgcaattttgggggataatacgtcaataaaaaattcaaatatataaactactacatatatctacatatctagatctacatagtagaagaatcaaatacatgtcaaaaccttttgctttactaaaaaggtgctttaaaaactctgatgcacatgactttttgcaatgggaaagacagaaaattattaaaagtagaagttgatttttatttagctgtgcttaaaaaaaataaccctagaaatggaactcagatttgaataacattctcaatgaaccacagcagtacctggtatagaatattctaggaatagagcaatactcccagaaaaatgtatacagagatgtttaatggacatttaagaacacctgctgtttttattaagcttcataaatttaattaatttaggataagcctatattgtctcaaaacaatttacagcttcatagcacgataaattattttaaattggattcacatttttattgtaatatattgtatatcaaaaattttatctgcaatgcgttctgaaatagacttaactgtcttttatatcctcacccccaaaattacagcaacaaaaatactcccttaaacacagcagtggtaataagtcataaaaggaaaaggaaaaaagactacaaaatataaggcaactatatggcataacaatacctctgaaggcatttttcagagagaaaatgtaaagtttcaataaattaaaggtttttaatctatataagattccttccaatgatgtcctcagttaattttaaaaagataatatttttacccttcattcttttaacctaataaaaggttaagcacaagaaactgcacatagaattttccaaatacttccttcacatatagtaatttgagtgatccaatcaaatcatcattaaaggcttactttatataaacaatgttttaaaaacactgagaaagatgccaggctgggcgcggtggctcacacctgtaatcccaacactttgggaggccaaggcgggcagatcacttgaggtcaggagttccagaccagactggtcacgtcgtgaaaccccgtctctaccaaaaatacaaaaaaattagccaggcatggtggcaggcacctcccagctactcaggaggctgaggcatgagaattacttgaaccctggaggtggaggttgcagtgagcccagattgcatcactgcactccagcctgggcaacacagtgagactctatctcaaaaagaaaagaaaagaaaaagattccaataacaaggtgtataaataaaaatgactattgtggttcatgttataagggcctcatcacgtggagctggactcttcattctgacaacttccaccatagagcaaaatgcatgtggagatatttttaagcacaatgaacaattcctattcaactgctgtccaccatcttgtgggaaagaactgccaggtacatttcaggacacaggaaattcagtgaggttttcatcccatcagtattttcaaaacatttatgggatgccaagagcttcaagtgccacataatcccacgtggaaagcactgctccaacgggaccactctgcacataaagaaaagcatttcttttcacgatatacttaagacatccattcatgagttaagaaaggagggtaactccagtctaacttcaacatttaaaaaagctatccttcattttctttcaagggttgcctttcttcacagcaatatcaaagcctaccagaactttacttccaccaatcatcacggaatgtaactctgtacatacaccatgcagactatcaggaagcttactgagaaaatcacaaagacaaggaatcttcactagaatcccaacagatcctaaaatgagactatttcaacaatcaagcgagggcccagggacagcatttcagccagatcacaggtgtaatatacatgtgtcgcggggccaccagaaccacctctctaataggtgatatgacacaggcattcagaaaggtgttcaaacaagtcttttattctgttaaaacacattttaaagtcataaaatgcatgggtgaaattttaaatactattctaagcatatcaatttctttccacttaaagagattatgccattaatcctattgcatagtacatttccattcataattgataactattagagagttaatcatttcaggtttagtggataaaatcttacacatgcagcccgtaatgaatgcaaaggctgacaagaggttgatgtaaacgagggactggctaactcattcaaagctttacttagcacttatttactcaaatcaatagcatgagtgagaaaattgtctcattaagatctagaaatagatgccattactcaaagaaaattatccataaatctcagaaaaacccaacctgattcccttgagcaagcagcgttttcagtctggctatttcagctcgcagctcacggataagtttgacgttggcatcctcattaatggtaggcttgttgatgatgtttttggctctatttgcatagcgaagagtacttagggtttctccataattgacatcagcaggtgaaatggctgtgaagaatgtattcaaaaaataatttatccagcactccatgttccatttaacacaaagttggtttgtaatttaaaagtcagattaaccccaggtcattggagagactaaatattcattgccacagtaatgaatatgaaaaattatctaacatttctaggaaagagtgttcacaatacaaaattaagtgtcattttgctcttctcaaatctagaatcaaccacctaaccaagtctaaaatgagatatgagacattcccctatagttaggtagttttccctgctgaaaacgtaagaagaaggtttaaagactatttgtcatctcaacattaagtaggaattcaaatacttttaaaagttctggcaaagtctactgtctggaaaaaaaaacagaatatgataagttttgaaaagggtcacaaatctatccattctcttcttaaagcttggttaatcttacccacctccaccactaccactcaactttaaggattaggtgactatacaaatgcatgtgggtgtacaaaccagggtaaatcccgtggctccatagttagcacatggcatgaagcatgggaagggcatgaagagaggggaagggaagaggaaagagaggaagagggaggggaaagtagagtcagaagggaaacaagtcctgacttctcccaaacaattatctcccctttctacgtttttttctctattctgcttctttcaattattggctgaaatactgacataaagtatactgctgttaccattatttgttttatgcattgggtttttttttcccctcccaattcttacttttaaattccgcatttactgccttaaataaaaaaacaaagttgggttattttgaccttgtgttcctatgatttttctcctatgaggtaaatttctaccttgcactttaagcaaagaaaagctgaaaagtcttcgtgcatgttatcacagcttccaaaatatggcaaggtggtataacagttaatgatgatactatagactggatcatagcaggatcataggaggtgattttcctcaagatagaaaaaccattacttttttaagatgtaaaaggtgctatttcctaataagacactttaaacttaaatatttacagttaattcacagaaaatattgtatgctcagaaaagtaacttaaaactcttactggcaatcatgatagttttagagtttcctccaaggctatcttttaacaaccaagtcaacacagaatccctgtaaggcacgaaaacttgcttcttctttgcaagagtatttgcagcatcctgagataaatcagctatgaaaaggaagaaacaaaggggagaaaggacaattagtaaaattttttttcctctacttttgcttcataaaaccttgaagaaattacctcagtttgcaacccaaatattacacatgaggaaaaagaggaggaaacagaggaggcaggagccaggcgtaagcatacctaaggcagaaatgacgttccccagagtcacgagggacttgttaatatttcccccttcctttagcctaaccccggtggctccggtggcatctgcacgctcacttccggcaagatcaaccaagtggatcttactgacggtttcacatggcatttcagaatcaaatttagcctgtggtaaaataaaaaagtaaaattgaagaggtgcaaagggccctgatgttgttgatgatatgaattctaactattttctgctcctcactgagatctctcagggtagatatttttcaattttattgttttactggccttcctactgattacagaaacttctcaaatttaatccaatgcaaaagaagttactgtatatgattcttaaactttctaaagaagcatttcattctcaaccaagccctgctgaatcaggctgtggcagaacagaaaactaggcactgagtggcactcagcagagaaatgtaagtaagcaaataataatttttattctcatctagaatcccagccttccaagaacaaaagctttccaaaatatgatcaatatagacaagtacggaaaagagcattcaaccattatcggatgttaaaacatcttgttgcacaaattatttcttttaatgtaaaatcttaaatactatattcctcgcttctgaattctaccaaaattttatattcacaaatacttctgatctatgtgttacattttgaaccaaaatgcgccccccgccagattactatatttttatagaaatttaaacctcttagaaatgagagatggtggccagacccagcagcttatgcctgtgatcccagcactttgggaggccaaggtgggaggatcgcttgagcccaggagttcaagaccagcctgggcatcatagtgagacaccatctctagaaaaaacttaaaaaaaaaaaaattagctgggcgtggtgttgtgcactgcagtcccagctccctggaaggctgaggtgggagatcacttgagcccagaggttgagactgcagtgagccgtgatcacaccactgcactccagcctgggcaacagagtgaaatcatgtctcaaaaaaaaaaaaaaaattagagatggtaatatgctaatcaagcactaaccagaaagcaggagaaaaaccaatcaacttgagtaaatctaaaggaaaggtctaacagaagattaagatgtggagaatttaatgcaagttgttctgactggccttagaaaactcatttttgtgctctttgatctccctcattaataaaatgctgcctctttgtatctgatgtgtccaactgttaacccagataaggacatccccaagctcctagcatatacttagaccctgacaggaccctacatttttgcattcatctattctactggcctcagtgttcaaatatttaccctcaataatttccacagatgttcaagatgctctccacctcttgatcataatgaattcttacattagtacttataaatattcgctgccctttaatatcattctaataatcatcatcaacacggcaagatgagtgccatggagcggtaatgaactgcactgagttactcaccttggcttccagctggtctgactcgcaatccattatatcccacagagtttgcaacaatgaaaacttttgcttaattaagcacagagcaagttgttttatgtctagaacagggtggaagccttctaagtatttcttaagggtacacatcaggatatttcaaattactgtgattgtaaccacagagaaactcagcgcacagcacatgttcaactctaattaacaagaaaatgacagtcagtcacctttacctgctgctgctcctggttcaacaatgatcagtcctcagctggtgctaatcagcaagtaaagacctcagggatggagccagctggtcccgcagcagcccttacctgagtgaacttgatggtgaagatggcatgagacctgctactgacgtcgttcatcccagtcgctgcggtggtccggttgatattgcccgcatccataagttcttctacgtcaccataattctgtactaaatgtttggataaatctgaaaaagaaaatggaaggggtgaagaaatccccctaatatataggaaatggaatacaaaattaccctctatgaaataatacacaactccaaaatctgctgacctgtctgaagacctcacttgtctctctagggtggtggtatgtaatgcagacctgggagctgggtggctggggccgaatcccagctctgctgcttactagccgtggacttacatagttatggacaaactgcttcacctcactgtgcctcagttacctcacgtgatcatgtgtacctaccacatagggccacggtccccaactttttcagcaccagagatcggtttcatggaaggccatttttccacagataggggtagggggaacagattcgggatgaaattgttccacacctcagatgataaggcattggttatattctcattaggagcacacaacctagatccctcacacgtgcagttcagaatagggctcatgctcctatgagaatctaatgccaccactgatctgacaggaggcagagctcagatagtaacgcttgctccctggctgttcacctcctactgtgcgacccacttcctaacaggccatggaccagtaccagtctgcagcccgggggttagaggcctctgacatacggtatttaaaaaaaggttagctattatattatcatcaacctcattcacattagtcatagcacatacaagaaaaatgcaaaagcactgccttcatgcaaaacccaaaagtgttttttaaatcattttaacaaattattttattaacttttttggaacattcatatggttctaaagtcaaaggctacacagttacactgtgtaaaaggtcccccgtccctatgctatagctccccacttccccttctgtcagggaaccaaatgttacatacccttctagaaataacctatacatacacaagcaatcatatttatatataattatctttttccccttacatacaaatggtagcatacaataagcattagtttgtaccctgcttttaaatggattaatacattaaagaacattctgtatcagttaaggtgtttcctcattcatttttaaggctgcaggggattggatcatatgcatgtaccacgaccaatttaaccatggagactacagcagttgttcatattttgtttccaattatgagtaatgctgctacaaatcaccttgcacataagtcttttcaaatgcctgtgaatgtttatacagaataaattcttagaggtggaatttctagacagttgaaattttgataactattgcaaaattgttctccatagagggcaatttacacccagcagtagcaaggtataagagtgcttgtctcccaaaaccctccacaatacagtcttatcaggattatttacatctgccaaagatgggtgacaaatgttacctccaagtattcttattttgtttttcttttactatgagtgaaatgctaagcattccttcctgcatttaaaaatcatctgtatttccgtttctacaaacagcctagtcatacatattctttgttcatttttctactggttgttgaatctgtccttactgatttataggagctctttatatagtaggaaaattagtcctttgtctaaaacttgaattcaaaatatttttcctattttgtaattaagctttttactttgcttacagtgtttctgtcaagtatgatgttttattttgctattctttgtttaaccatttcaaatttaacattgtttattttatagtttctgagttttaagtcaggtttttaaaagccttctttcctccaggtttccgggaaaaaaattaacccacggatttttatagtcattttattatttaatatttttgcacttaaatcttcaatctagttaccatttatcctggtgtaaaactgagttgtggtgccaatttacttttttttcctcctacacagcttaataatccctctaataatttccctaaggtttgaatagcacattgattataaactaaattcccctaagtatctaggtcagattctggatgtttgctctgttttgctattctatctcttcatacaccagttttatatgttttaacatgtgataagacacttgtcagaaaacatgaaggcatgagttaggctaaaaactcttaacagtaatagctataccacacaccacagaacaactacatactggcacaccctgctttgctttgggcatacaaggcaaaagcttaagtggaaatttattaaaatacagatgggccgggcgtggtggctcacacctgtaatcccagcacattgggaagccgaggcaggtggatcatgaggtcaggagttcaagaccagcctggccaagatggtgaaaccctgtctctactaaaaatataaaaattagccaggtgtggtggcaggcgcctgtaatccctgctactggggaggctgaggcagagaattgcttgaacccaggagacagaggttgccatgagctgagatcacaccactgcactccagcctgggcgacagagcaagactccgtcccaaaagataaaaaaaggaatacagatggggtcctgttgttatatctggtatctcccaggaaaagaagacaaccaaaaccaggaagaactttaaacctgtgaccagttctgtcctgcatccacaaagacacaaatgaagaacatgaaagcacatctctatgtgcgattcctgcagtccagccattctaagttgccttatacagaggtggtaagatcagcttcattatgaggacagttttaaatccagccgattcttaaataattagcaaaggccaatcctgtactcatcattgcttgtggcattcctcacaactgactgtgccacaacgagcgtatcacaacacagatgctgaaacccacagaggaaatcctccaaacacacttccgaagacgcaagaggttcagaatatctttattgtcatatatcaccattagggtcagtaaagatacactgcaaaaatgcaatgccatttagagagacagattgcaggtttgcttaccttgccttacatttggaaaagaaaattccagagatttcttaaagacagaggaaatctattggtaagcctcataaaatcaacggatggccagtgaagtataaattcactaacggaacatcatgtagtgacagctcatgacattcttactataataaaattccaaaattaaataaatttttaaaagctcaccattatgctatattttttcattgaaagtgttatttttacatagatcacaaaaagaatatggctgtgaaatatctactcttaccctcaacataagggccttctttgggatgctcacggactctcaaattgaaggttttagatgacttccgccgaagtagatctctcacacgttcgttataaatttctaagtagctaaaaatttaaaataaaattgaattcagaaaaatgatttcagacattaatatcagtaacaacacataacagcagcaacctgctgacataaatggccacagcagcagttaccatttatgagtggtgactgtgtatcaggtacaatgagtcctcacttaaggtcattgacaggttcttggaaagtgcaactttaagggaaaggacatacagtgggtcctcaaataacaatgcttccttcaacatcatattgctataatgttgacgagaaaaagaactggtttcattatatgttgtttcacttaaagtcacgatttccaagactgtatcaagaagcgacattaggccaggggtggtggctcacgtctgtaatacactttgggaggccgaggcagatggatcacttgaggtcaggagttcaagaccagcctgaccaacacggtgaaaccccacatctactaaaaatataaaaattagctgggtgtggtagcggacacctgtaatcccagctactcaggaggctgatgcaggagaatcacttgaacctgggaggtggaggttgcaatgagccaagagtgtgccactgcaccccagcctgggtgacagagtaagactccatctccaaaaaaaaaaaggaaggtacattaagtgaggacttcctgtaccatgctaagtactagacatggattatttcattgaatctccacaatacccagagataggtaccactactatcctcattttataggttaggcaagggaggtttagtgtgattcaaataacttgtccaagaccacaaagcagtcaagtaggtgtaaaaatcctatattgccatgtctgcccttgaaactaccgaagagactggctcccctcacaggtttaatttcaaggaggaaaaagcacctcaaccactcagatttacttgtagattagatttataatgatccaaccaacacaaagaataatataaaccttactaagctaaaagaatgaagcaagtaattggtatacacttaaaagtcagaagctcactccatttgagatgaacatcccacattagtttctgcccaagctgttatttctgccagctcccaaatctttatccaaactgtacccaagaaaatcactaaaaacttatgtgttttaagctttatccccaaaccataatcacaggaggggaaaagggaagactttttctttaggaatctaaagaccttatccatttccagcacctaaatgcaggccaaccagcattgactctaatcaagctcacacacagttacccaggccacaggccctacctgacttcagttcgaaaagaagcttcatcccatctggtggtttcatttatccgactgaagagtccttcacagatccgaggtattaagccagaatctccctgcatgggaaagaccaatgtcacagctgtcactcaaaataaaagcaactgatgactgaatttgcaatttgctggcatgaagttagactcaagtgacctgtatgccaacccctggcctaccacagcccacgccatataccccctccagggctgctttctactctctgaaatgagatgattgagccttctgatttatacaggctgggactctgataatatacggttatcagttgttagttaaatcatggcttacaaacaaggaaacttaatttctaacatttaaataagacagtttataactgtacaataaatgttaaaaatacatgctcaaatgaacaaggtaggtgaaatacacaccaggcaaaaaaacaccaagaaaaacttagcaatccccacggtagttaataattgccttaaaaacttaggtaacaagaccacattaaaatccatgctggccgggtgcggtggttcacacttgtaatcccagcactttgggaggccgaggcgggtggatcacctgaggtcaggagtttgagaccagcctggccaacatggtgaaactgtgtctctactaaaaacccaaaaagttagctgagtgtggtggcacatgcctgtaatcccagctactgggtaggctgaggcaggagaatcgcttgaacctgggaggcagaggttgcagtgagccaagattgcgccattgcattccagcctaggcaacaagagcaaaactacgtttaaaaaaaaaaaaaaaaaaaaaaaaccacatgctatgtccctcctttgacagagtaacccctaccctggccttcctcgatggaaaattttaatacaccatattatttatacaatgtgggtataacgttcaataatgttcatgtttcagtcaaccttaaaaagctgatgaacctcagaatatagtaaaaatcaggcaaaatgatcttgctaggaaaccaaggcagagcatcaatgctttattcacatgttccctccctaccttcactcaacccccacacccaaaaaaataaaagaaagcatgactgtgttcagagattgttttttctttgtaccattaaatcagtactaattcttaacaaggaaaaatgagtcttacgtcgtatttttggttcttactttaaaatgaagaaaggatacccaagcagcactcaactataagattggagaaaaacacttgtaatttgtgagtgctttataaatgtttgacttacataaaatagttactagggaatcaacatacaaatttcacttttggaagttttgttttttttttccaaaggcacagtaggaaaggaggaagtgagaagtaatgataaaaggaaatgtgaaactctcgaaattagctgtttgttcctctcatttgttcttcccttttcggagaagacttcccgaacagcacttactgacttcttgtgtaaaggaagagcctggatgtaagcagtgaggttacatgtcctgaaataatttattctggaaagatctgtcttctaacacacgacttccatgaacctccaaaccttcagcattacagacaccacatgtgtgccagcaggaagccctcaatcatcttccactagtgtctctacatctcaaaaatgccacaggtttggcaggcaatgaacagagctctcactaagaaataagaaaaaaaaaaaaaaaaaaaaaaaacaggccaggcacagtggctcacgcctgtaatcccagcactttgggaggccgaggcaggcgggtcatctaaggtcagaagttcgagaccagcctcgccaacatggtgaaaccccgtctctactaaaaatacaaaaattagcagggcgtggtggtgcacacctgtaatctacttgggaggctgaggcaggagaatcacttgaaaccaggaggcagagcttgcagcgagctgagatcgcaccactgccctctagcctgggcgacggagtgagattccatctcaaaaaaaaaaaaaaaaaaaaaaaaaaaaagaaaacagaagaatgatctaaatctggagaaaacacagaacaagaaagttcttgcaataattcctagtttttactcctctgtattttggggcaagtataacattaatatcagttaacttacatagcttataaaactgcatacggtgtgtttataaatatgtaaattatataaactatataattctaactttttaatgtattttcaggatttatgtagtacctttctatcaaagagttagaattttttttacatttttcttggggaaaaatgttttgaataattttaaaaagaacagacttcagtaattttattcaaactgttgtgttggcagaaaagaagaataaattacttacgggcccaacacacttttttgataagattataaggcctttaaaaacagaaaatgagcagggacttgcatccattattcatgcttatatacttaaaactatttctaatttaaaatctctcaaaggaaatttagtccaacttattactgagttttatcttattactaaagaataatcagaacatgaaaagttagtacagaccaaatagataaaagagatcattctaccagtccagagaaagataatgagaaatttccttcccacacagtataaacaacgtacagaatttcccatcatagtgtatgactttccagatccagtttgcccatatgcaaagacacaagcattataaccttcaaatgcagacttcacgacatctgtgccgagggttttgaaaacctgaaagccaaaaagaacacacaaaagatacaattatcatagattttaataatagccccttcagtgttgacaatgttcttgaatgatactttcagctcttaaggattagaccatataaataaatcactgcagaaccattcacaacaacatatgtagacaccacagtttttaatcaaaaataaactttttaagcaaacaaaaagcagccccatcctctttcctacttaagtttaccaaaaaatatcatgaagtataaaaatgtaaacaaggcaaagtgaaaatcatgtttagaagcaaagactattttaaagcatgatgattagccattcagaattatataaatatataaagctattcattctatcagagtttccagaaacaaaatactcaaaacctgaaggtcacagaaattactgcccaagccaagccaaatcaatgccatcattttaagggtccagctagtcatcaaaatcaacctctgcaggtgctcatgcagctgagtgacgggtggctgtagatgaggatggggtgctgggctcccccatgtcagtgtccagatgctttttcctatttggacatttgcccaggatggagagggcagggagacaagctgtgtggggctggggtgggggtcacacacatggcctgaatccacgtccgatgttccatataattacagtttgggtagtgaaaggaggtgaagtacaaatgcttcacccagacaactgatggtaaatgaaggaaatcaaggttcaaagtcttagttatagccagctggaaacagacaacaaaagctttcatgtagtctcctgtcctctcagcccagcacactaagggcacataaagcatctccctgcttcaaaaagtaggcacaacagcagctgaggagatgccaaacaaggaagctctgtcagctccagatgaagggctcctctgtggtgtcaccaacgtccaaggtggggcctcagcatccctacaggagcattcggtctatgagtgacaccacatcagccaactcatgggacccagacggatcaaccaaatagtcatctccagctactgccaaatcaagagcagcaggtctcaaactttgcagcccattacaatcacttgggaggctttgaaaagtccaatggccaggccagtaacccagcccagtgaaatatgaatctaagggggtgtgaacctaggaatccatattcttctaaactccctatgtgatttcaaagcgtggcaacatttgaggagtaacctagagcactcacatctgccagtcagcacaggcagtacagggaccctgcatggaagccagattcccattaggatgtgcacatggcccacatcagtgcagacatatggagacaactcccctctggccacaacacccacaccctagacagggccagtaaacctggccatctccatctcagctgcacctcaaccatccctgctgataacacagcctgtcatccaaggacaagatgaaaatacagccaactggaactcagctgtcttcagatccatcttcccactgacttctacagactttgtttcctcagcctcatcagtaaaagatttcaacaaactgttatttccattgggtcatttccacaaattgccagtctcactcattctgagttaattcttaaccattttagctttaagagctgacagttttcaatcttgctctcaaattctgatgacttactcaagtctcaaccataatggcaactcacacttactccggtctttctaagcactttcgtgtgttcatgtataattctcatcaaaacgctacagggagagtagtgttacaagacccattgatgaggaagctgaatggggagaagtcaggtaactgggaacacaccagggagtgccagagctgggactgcatgcaggacttagttatcactgtgatgtgtcctcttcccacaccctcgaaagcaacaaccaggccccaatcctacctggaagggcccctccctgaacttctcttaagaagcaaaagtcaggaaccccaggggcactcaggactccagaccaccagttggaggctcattttcaccactgtatatggaatatgagtaaaaattaaatatttccccaattctctcagattaaacaaaacacaaaaggcaaataccattttttatgaattcactagtaaggaaaaaagtcttctaaaaacttttcaaagaataaagaaggactgtttctcatagtttggcctggggctaaaccaaagtcatggaaaatatcacatttaaaccaaacccaaaggttttcagaataaaattattccctagggttaaaatctatgcctaccactttgctattacttcattgcccagaaagttaacccaggcggttttccggttcaggggctcagggggtttggggccaggagacatgactgcaaacgggtctagaaaatccaggtctggaggcgcagagacccagggctggctcagactcagactcattctcagtgagtctcaaataacccacccaaacttggcgctatgacctggaaaagcagccggcactgcctgcatctctccagaggtcttggcaaggaaatcgagatacccccatcacagctcccacagaggatgcaccgagcatcgcccccacaaccaaggtgggaagcggggcctgctttatgagactgacaactgctcttccccgctggcatcagaacctggctggcctggttacctgaaatccaccttgctgcctgtcagagcacagatttgaaagctgatttcctgggtaatccaaggcatcactggggcctcacttgaggggaactgcccacaagagggcactgttaaaataaaaactcgctcatcgggcatgtcaactgggagatgttaggtttcaagtttctcctgggttgaattaaggaacaggttgtgtgagatcaaagcctccctttggagttctgaagaaccattaagaaaatcagaccttgtttaatgatctttaatttacatgactgtagatttaagttgctcattgattttttttctaattctaaaattaatttgggagaaaaaatattaacggtcatcttacttggtatttgttcaaggttaagggaaaattgaactatagtagtagacatgatatattttctcaatatgcctttacattcaaatcacacacacacacaccatgctacactagcatcttcccctatttatagcagggatgcgacctgccagccacttcctgtgcctgatccatctgtcatcgtgaacacaccactccttctcgtccacatccttaagaccttccagtggcatctccagcacccgtacagccccatggtccaattctgctactattaaaagtcaattaggtctacaaacctgagcaagttccttaagcttactgaatctcttcaacaaagaaaaatagagttaaaatttaacacatttgattcctgtgaggattaaacaacatagcacatatgaacaccaagcagagtttctgacaacaatggaagttcaaccaacatcagtttatctttcctctcccaggccttctttcagaccaggcaccacctctctctgtgaggctcccattcccatcactgccattccttcctatctttccctaattttttaagagacagggactcgctatattgcccaggctggacttgtcctggcctcaagtaatcctcccacctcagctccccaagtagctgggactacaagtgcgcaacactgcacccagctcctatttttcccagatgtttgattcagtatcttctggatatagtcgctccagtcctccaactttaacatttacattgtctcagaaagccaacttcctccacaaaccatttacaaatggactacatttctcaaatgttaaggtgcacacagagaactggggatcttgctaaaaaaaaattcagatctaattcagtaggtcttggaataagacctgagatttcacatttctaacaagttcccaggcggtactgatgattctggtgcatggacacatttcaaactgcaagaaacaagtacttttggtggctggcaagatggccaaataggaacagctctggtctgcagctcccagcaagatcaatgcagaaggcaagtgatttctggattttcaattgaagtacccggctggctcatctcactgggactggttagacagtgggtgtagcccacagagggtgagcagatgcagggttgagcaccgcctcaccccgggaagtgcaaggggtcagggaactccctcccctagccaagggaagccatgagggactgtgccgtgagggatggtgcattcaggcccaaatattacgcttttcccacagtcttcgcaactcgcagaccaggagattccttcgggtacctacaccaccagggtcctgggtttcaagcacaaaactgggtggctgttcaggcagacatcgagctagctgcaggagtttttttttttttttcataccctggtggcacctggaacaccaatgagacagaaccgttcattcccctggaaaggaagctgaagccagggagccaagtggtctagctcagcaaatcccacccccacagagcacagaaagctaagatccactggcttgaaattctcgctgccagcaaagcagtctgaagtggacctgggatgcttgagcttagtggggggaggggcatccaccattactgagactcgagtgggtggttttaccctcacagtgtaaacaaagccgccaggaatttcaagctgagcagagcccaccacagcttggcaaagccgctgtagccagactgcctctctaaattcctcccctctgggcctggcatctctgaaagaaaggcagtagccccagtcaggggcttattgataaaattcccattttcctgggacagagcacctgggagaaggggtggctgtgggcacagcttcggcagacttaaacgttcctgcctcccaggtctgaagagagcagcagatctcccagcacagcactcacgctctgctaagggacaggctgcctcctcaagtgggtccctgacccctgtgcctcctgactgagagacacctcccagcaggggttgacagacacctcatacgggagagctccgggtggcatctggtgggtgcccctctgtgacaaagcttccagaggaaggaacaggcagcatatttcctgttctgcagcctccgctggtgatacccaggcaaacagggtctggagtgggcctccagcaaactccagcagacctgcagcagaggggcctgactgttagaaggaaaacaaacaaacagaaagaaacagcatcaacatcaacaaaaacgacatccacacaaaggtcaccaacatcaaagaccaaagatagataaatccacgaagatgaggaaaaaccagtgcaaaaaggctgaaaattccaaaaaccagaacgactcctctcctccaaagaattacaactcctcaccagcaagggaacaaaactggacagagaatgagtttgatgaattggcagaagtaggcttcagaaggtgggtaaaaacaaactcctctgagctaaaggagtatgttctaacccaatgcaaggaagctaagaaccttgaaaaagggttagacgaattgctaactagaataaccagttttgagaaaaacataaatgacctgatcgagctgaaagacacagcacaagaacttcgtgaagcacacacaggtattaatagctgagtagaccaagcagaagaaaggatatcagagattgaagaacaacttaatgaaataaagcatgaagacaagattggagaaaaaagaatgaaaaggaatgaacagagcctccaagaaatatgggactatgtgaaaagaccaaacctatgtttgattggtgtacctcaaactgacggggagaatggaaccaagttggaaaacactcttcaggctattatccaggagaacttccccaacctagcaagacaggccaacattcaaattcaggaaatacagagaacaccacaaaaatactcctcgagtagagcaaaacccaagacacataatcgtcagattcaccaaggtggaaatgaaggaaaaaatgttaagggcagccagagagaaatgtcaggtcacccacaaagggaagcccatcagactaacagtgaatctctcagcagaaaccctacgtgccagaagagattgggggccaatattaaacattcttaaagaaaagaattttcaacccagaatttcatatccagccaaactaagcttcataagcaaagaagaaataaaatcctttacagacaagcaaatgctgagagattttgccaccaccaggcctgccttacacgagctcctgaaggaagcacaaaatatggaaaggaacaactggtaccagccactgcaaaaacataccaaattgtaaagaccatcgacaccatgaagaaactgcatcaactaatgggcaaaataaccagcttagcatcatgatgacaggatcgaatacagacataacaatattaaccttaagtataaacgggctaaatgccccaattaaaagacacagactggcaaattagatagagtcaagacccattggtgtgctgtattcaggagacccatctcacatgcaaagacaacaaaggctcaaaataaagggagagaagaatattcaccaagcaaatggaaagcaaaaaatagcaggggttgcaatcctagtctctgataaaacagactttaagccaacaaagatcaaaaattacaaagaagggcattacataatgttaaagggattaatgcaacaagaagagctaactatcctaaatatatatgcacccaatacaggagcacccagattcataaagcaagttctcagagacctacaaagagacttagactcccacacaataatagtgggagactttaacaccccactgtcaatattagacagatcaacgtgacagaaaattaacaaggatattcaggacttgaactcagctctggaccaaacggacctaatagatagctatagaactctccaccccaaataacagaacacacattcttctctgcactacatcacacttactctaaaattgaccacataattggaagtaaaacactcctcagcaaatgcaaaagaatggatatcctaacaaacagtctctcaaaccacactgcaatcaaattagaagtcaggattgagaaattcactcaaaaccgcacaatcacatggaaactgaacaatccatcacataaacagaacgaatgacaaaaaccacatgattatctcaacagacgcagaaaaggccttcgaaaaaactcaacacccttcatgctaaaaactctcaataaactaggtattgatggaaggtatctcaaaataataacagctatttatgacaaacccacagccaatatcatactgaatgggcaaaagtcggaagcattccctttgaaaaccagcacaagacaaggatgccctctctcacaactcctattcaacacagtgttggaaattctggccagggcaatcaaggcaagagaaagaaacaatgggtattcgaataagaagagagaaagtcaaattgtctctgtttcacatgacatgattgtatatttagaaaaccccatcatctcagcccaaaatctccttaagctgataagcaacttcagcaaagtctcaggatacaaaatcaatgtgcaagaatctcaagcattcctatacaccaataacagacaaacagagagccaaatcatgagtgaactcccattcacaattgctacaaagagaataaaatacctaggaatacaacttacaagggatgtgaaggaccccttcaaggagaagtacaaaccactgctcaaagaaataagagaggacacaaacaaatggaaaaacattccatgctcatggatagaagaatcaatatcgtgaaaatggccatactgcccaaagttacttatagattcaatgctatccccatcaagctaccattgactttcttcatagaattagaaaaaaactactttaaatttcatatggaaccaaaaaaacagactgtatagccaagacaatcctaagcaaaaagaacaaagctggaggcatcacactacctgacttcaaactatactacaaggctacagtaaccaaaacagcatggtactgatatcaaaacagatatatagacaaatggaacagaacagaggccgcagaaatgacatcacccatctgatctttgacaacctgacaaaaacaagcaatggggaaaggattccctatttaataaatggtgttgggaaaactggctagccatatgcagaaaactgaaactggaccccttccttacaccttatacaaaattaattcaagatggattaaagacttaaacctaagacctaggaccataaaaaccatagaagaaaacctaggcaatgccattcaggacataggcatgggcaaagatttcacgactaaaacaccaaaagcaatggcaacaaaagcaaaaggtgacaaatgggatctaattaaactaaagagcttctgcccagcaatataaactatcatcagagtgaacaggcaacttacagaataggagaaaatttttgcaatctatccatctgacaaagggctaatatccagaatctacaaggaacttaaacaaatttacaagaaaaaaacaaacaaccccatcaaaaagtgggcaaaggatatgaacagacacttctcaaaagaagacatttatgcagccaacaaacatacgaaaaaaaagctcatcatcactggtcattagagaaatgcaaatcaaaaccacaatgagataccatctcacgccagttagaatggcgatcattaaaaagtcaggaaacaacagatgatagagaggatgtggagaaataggaacgcttttacactgttagtgggagtgtaaattatttcaaccattgtggaagacagtgtggcgattcctcaaggatctagaaccagaaatgccatttgacccagcaatcccattactggttatatacccaaaggattataaatcattctactataaagacacatgcacacgtatgtttattgcagcactattcacaatagcaaagacttggaaccaacccgaatgcccatcaatgatagactggataaagaaaatgtggcacatataaaccatggaatactatgcagccataaaaaaggatgagttgatgtcctttgcagggactcggatgaagctggaaaccatcattctcagcaaaccaacacaggaacagaaaaccaaacaccagatgttctcactcataaatgggagctgaacaatgagaacaaatggacacagggaggggaacatcacataccaaagcctgtcagggggtagggagctacgggagggatagcattaggagaaatacctaatgtagatgtcgggttgatgggtgcagcaaaccgccatggcacgtgtatacctatgtaacaaatctgcacattctgcacatgtatcccagaattaaagcataatttaaaaaagaaagaaagaaagaaacaagcactttttcataccctacttttcgagatgccattgcatggattacaacccaggccaggcaggacaggaattcttatccccgttttaacatatggagacttaaagcaatgttatctaaagaagctgtcaacgagccaggaagaggcccagcaatgaagcctgcgtttttccttctatactggtgctccccatttctaacctcactctgctcaaataagcagcttttccccaccccgagaaatatacttgtccctctgctcacctgaaatgtcaacatcagtgtcttgataggcttttgggggcacctttgtgtctgttattatctgtccacttcacatctacattttagcccttaaaagcctacaggcaagatttcttggacaaattccagcatcattctagactctagaaagattctgaatgaacgttctttctttctagaatccactctaaaacctgtaatgatccacacaacctgggaacacatgacttgggtttgaagtttcctcctaaatctccgcactgaataggactcaaggttaagtggcttctttactgtgcttcgcagcatacacatgtctccccagaaatgctttctatgtagagctccttctaaacaggaaccatatccaagttttgaaacaaattaaaaattatcatcattatgctcaaaggtgaaaaaaaaatcaatcttttgagaactgaattcttctcaggcttaaatagatactcctacataacactcagaaaggtaagttagcaaaggctaattttatacaaaaattacattcagaaagaaattggcaagatattttaaagtattttagggtaggcatgtttttctcaatgtgaaaataaatcaacataaatattttgaaaatatcatataccatttcttgtgaaacgtaatctgggctttttgtatcagcagaataaaaagaaaagtcataggtgaaggtcttggtccgttctcttcctgagtccccagtgcctccttctggtatctagaaagaaatgattagaataataatgataatgtaaagagcactgccatttgacccaaatttccatgtttataccctgactaaaaaccatttcattcctgctggcttctctaaaaaaataaataaataaaatttaaatataaactaaactccttgcagcaatccaagttctctgtgatatgacccaagaatactattctgaccttttctttttatcactattaactcctaagaacccaacactccagccagactctgtatttccaccttcagtgattttttactgttccctccacctaaatccaccagagttgggctttgcacaactacaagggtggtattcacatagatcatgataagattggcaccttctaaagctgtatgatttggtggcctcactgaaaattctaggtcagatgtctcctctttcatgacacttcccttggacactccatggagaagtaatttctcctacctctgacagcctagactcttccaggacacatcatattgtgagtttattgcggatgtttgcatatatcttgtcccccttgctatatgcttaaagtgcacctcagaaccatgttttaacatcttcatatgctcccaaagcctgcttattggacatatgctgaataacttcaatgagcaccacgttttccacatgattcacatattataaaaaaattgttatgattcttatgaaaacactaaaagtctaggcatctgttctggttactcaaacatcagatgataaaatgtttaaaaaactcaaaaagcaacagagtaatcgaggaaaatagattccataacgcacaaagaaaggagactcatccagagtcagcggtcttttaccaaagcactgtgagcgtagaaagacacatgaaggaaagacaaggtaattaccagcagggaatggacaagtgacaactgggtagaaacatgagaatatgcgagaggccaaaggaagggaaagaagcacagtgcaggccagatagagctggaaggcacaagggttgtgctaagcagaggaagaaaggcatccagtggagaatgcctcaggcaaaggacaccagcgccttaatggaggaaatgaaatgatccagaggctgcccagttggaagatgggagcatttcccagcttctaccattggagatcaactcgcactactttgaaattggatctcaaagtacccaatcctttgagccataaattaatagaaatctccacagatgtgaacaggagatagatctgacttggccatggagcatcatgtctcagaaacccagacctaaaagttaatgacaaatatcaaaggagaaaggcattgaacccataaagtacttcatttctttcttttttgttgttgtttttttgtttgtttgtttgagatggggtcttgctctgttgcccaggctggagtgcagtggcacaaacagggctcactgtagccttgatctcctgggctcaagtgatcctcccatctcagcctctcgagtagctaggaccacaggtgtgcaccaccaagcccagctctgatttcttcaatattaattttatacccccgttaccctcctcagcgaaaagcattcagtgccctttaaaaatttcctaaccaaataaacaaacaggatatttttcagtgccaaaggagaaacttgccatcttgaaaattttttttaactttttttccagaaaagaaatttggtggttttttttaatctttcctccctgagttttgaataatagtatcagttcttcttcaaggattaccaaacatgatcctcttcattaaaaatggaaaaaaatataggggcaaagcttatttaatgttcacagaacacagtcaattgccaggctaagtccctactacgaggacacaggatgaaaatgcccgaatctgggatagactcaggagctcctggaccagagcaacagcttggatttggcttccagatcaaataaagccaggaatgggaaaggaaacgggatcaactcttctgcttcaagactgagcccaagccaggtgcaagctgacgtggctaactgcactggaaaggagggtgtggaaacagcagacaggctttatttactcattagtcatccccacagtaaagcaatcatggggctcttggaacttaagcaaggccaggtcatgacttgcctttaagtttgtgattgtcgttttgcttttctccatctgaataatgaacttggcctccaagtccttttccctgcaatacaaataattcagtagtggttagaagagaaaagattattaaaaacaaaacaaaactaaacccatttgttttatttactttttacgttaggagtttattttcaaatggcatctgaggagcaatcccagacacggctcctcccaaatccttactaatataacatgaagatacgcaaaatgatgccaccatcaacaattatggctgatacacagtgtgttgttaaaccctgaaagaatttccaattgtaagccaaaagaagagtaaatgaaataacagacaccacaaagagctaagactcaccaaaaaaaagtagcccccctcaccttgttacaaagagaaagagaccttagccccctacccaagatgaaaaccaaagagaaaactggagtggttacaagcaggtgctgcttccagaagcagccagggcactgttccctcctcctaccttctttctacatctgttcagaaactgcatttctcagaaaacagcagaacaggaggactcctaaagagtacagttccctagaataaatgaccatacatttacccaatggagtgtgacgccactgaacaaggaatgaggaagatccctatatctgttatggcgtggccactgggatatactgggatatactgttcagtggagacaaaagatggagaaaatctatgtagaaaaatacaaattatatttaaacacttttttaaaacctatgtatttttcaaaaggctacctaggaaaaaaagggaaattgaggataaggatttggggcagacaagggaagtggacaaggatagaagctagatttctgcaaatatactttgatctggaggtcatctttagaacgataaaaatgatttatgcaaaaataaaacaagagtttcaaaaaacaagctataatttagaagtaagttgaagcgaatgaatctagctgtgtaccacaaagtgagaaactatttcaattacgactctatagaggaatttgactgtatactataatgagatatatcctaaaaagaaaaagaactacaaagaaatcttaaagcatttttagtaatcatatttttggtggtaatgtaagtgccattattctgagatttctgtctgtgtactgtgggacattacaagagtaatgatgttggtgccctagagaaccaaggtttttgaagtggctgaatgagatacaaacataagtttgatgaggttaagtaaaaactgtagtcctggccgagcacggtggctcacgcctgtaatccctgcacttcaggaggcagaggcgggcagatcacctgaggtcgggagttcaagaccagcctgatcaacacggagaaaccccatctctactaaaaatagaaaattagccggccatggtggcgcatgcctgtaatcccagctactcgggaggctgaggcaggagaatcacttgaatccaagaggcagaggttgcagtgagccaagatcacgccactgcactcactccaacctgggcaacaagagtgaaattctgtcccagaaaaaactgtagtcctgaatctaattggaaggagtagcagaaacttcatctttcatccaaaatttaaaaaacaaacaactcccttgctttgtccattgaaaaggcctagaatcttacactcaaattatagcctataaataacattttccactaaaataagtcagggttccttggagaagtgattcaatccaaatactgaaccatctcttcacactataaagcaggaacactaacacaggtcactagggctgtggcgggcaccttctaacacggctcccagtgattgcccggcactcacaccctgtcgtgtgcgatccttgcccttgactatgggctggacctggtgagtcacttctaatgactacaacacaaacacacccaagtgatggtctgtcacttcccaggcgggctttcaagactgtgacttctgtcttgctggctctctcttctgccctctctgtttgagccctggcagtgtgaaaagtcagggacgacagagtgaggacccctgtggacagacccagccagcaggaaacaggggcccgctagcagcacgccagacagcctggcagggcacgctccccaagcccgcaccgggacatgatgatgagagatgactgggaagccgtctggcaccctgactgcagcgctaggggagagccggagtcagaggaccctgctcaaccccacccagattcctgacccacagaaactctgagataatacatgctgtgttttgttgttgttgtttggttttttttgagacagggtttcgctcctgccacccaggctggagtgcaatggcatgatctcagctcactgcaacctccacctcctaggctcaagcgattatcctgccatagcctcccaagtagctttgactacaggcacgcaccactgcacctgcctatttttgtattttttgtagagatggagttttgctgtgttgctcaggctggtctcaaactcctgagctcaagcaatccacccgcctcgacctcccaaattgctgggattacacacacgagccaccatgcctggtcaatacatattgttttaagcccctaagttttggggtaatttgttatacactaaaagaaaactaatacaaggaccctgtcaaaaggactcaggaaccaacctgcataagttcctgctgcccaaagttgagaaatctggacagcaaagaaactaaaaaccaactgaaatagatagaatatatttaagcacataaactcataacttaaaaataaaaactcagtggtcccctctgaaagatcaaaggatctgtctcattattttgaaaactgttaaaagaaagaatcaagcatttatcttgcatttccaaaactatctatacttcaagtaaccaaacaactgtgaaagaaagtttctcctttagagatattccagctaaaaaaataaagaagtaataacaaaatatcatttcgtcacccctggtgaattaatggctctagggagggaccaccgatggttaccaggccagccactgtgagaaaaccaggtacgaggtgtattctacctgaagtaccaacgcgactgccccagggttcctgtccttccctcccagggatggcctgactctgacctagagctgccctatagggaaccagcaggaatgacaagtgtaagtgggaacacgccaatgttctcaggtgggggaatcggtaaaatccagcctgtgggaaaggcagcagggtaaatgactcagcatattccaaattatgacaaattgcaaagaatataacgatgaaagggaaatctaaagctagaaaagacattaaagacatatcaaccaactggatcccaattcaaacagaaaaagcactttgaaaattataaccatttgggaggccgaggcaagtggatcatctgaagtcagggttcgagaccagcctggccaacatggcaaaaccccgcctctactaaaaagacaaaaaatagccgggtgtggtggcgggcacctgtaatcccagttacttgggaggctgaggcaagagaatcggttgaatccaggaggcggaggttacagtaagccgagattgtgccattgcactccagactggacgacaagagcaaaactccgtctcaaaaaaaaaaaaaaaaaaattataacttacgtagggaaatgttaacactgactagatatttgatgatattaaggaattattgctaatattgtaggtatgataatagtattatgacttaaaaaaccttttagagatacatattgaaatatttacaaatcaaatgatatgttacctgggatttactttaaaataatccaggtatggggaaaccagctaaggggtaacatcttggccagctcagacgaacagagacaaaataaatatcagttgtgaacaaacccaaaaagcatttgcagtaaacaccatttgggaactacagcagattcccagggccaagtttaacatttccaagcctgaaaaatgcttccactccaacccaccaggagttgggcaattccattgtggacccaaaagtaagaactgcttcagggacaccccatgttcatgtggctacaaaacaaatacttcataaaattaaacctttcctacagcattcaattaccaaagcatgtcctgctcaacaagagaacaaaccacctgggtttatttatatcacagaacaccaaacccagattcctcccattcccacagtgggtccttttttctcaatcaatcactaacctaatgcatctagagctttcatcttaaaaccactattatcaacaaatacctctcaggaacacaaaattatccagctacatagaaatattagaagtgatcgtggtaatgctcacattgacttgtcaattcttgcctagaaaacaaagtaatgtggctcatacaatgcccaccactcctgctggaagccagagactccataactccccatctcagaaccttacacctttggagcagctaaatttaaagggccctccacatgatcatgtattctaacctgcaggtaaccagggcagtgcgttcctagttctaaattaacatccattctataaaagcactaagtgagatactgactgaaaggctgttatgcaatatgactgtctttttattagctacttctaaaatgaaaactgaagatgcaggtaggttttgaaggtttcaccacctccctgaaatcctatgtactgggatgactggctgggaagggggatcaggagcaggaggcagtttcactattctgagggtctaccacattcctcagtttctcaaagagttccatcaccccaaaagataggaatccctgctctgactcttaatactcaaaatatgctccagagaccagcaacatcagtggctccagggaagcttgacagaaatgaaggttctcagtccccacctaaaacctacagaataggaacctgcattttaacaactgtaaatgattctgatgaacgttaaaatttaaaaagcactgctctgatgctgtacttaatatgacatagtaatagatgggtcttaggtttacccttatgaaataaactacttcttacactggaaaactcactaacctttgttctttgacttttaaattttatttttaaaatcacatgacagaatatgaatggatataccataagtcagctaatactgtctccattctatgctcttaagttgtaagtggcttctgaccaagagcaataactgctgacataatctgatgagagatgtcatgtgaatgtcatgacactcaggttccctcattctcaccctgccaaaccatgagtgagtttccagccctttctcttcccagactgtgtttctcaatgtcaatctaaggctacagccaataatttaaaatcatatcaaaagataattacaggtcatcaacattaagatcgaggccatctatttcagaaaagaaatttcacaaataatttcctaacttgcttccttctttaagcatacaaactgaaacagtttaaaaaaaaataaaaaataaaaaataaagatgtggctgggcacaatggctcccgcctgtaatcccagcactttgggaggctgaggtgggtggatcacaggtcaggagttcaagaccaacctggccaacatggcgaaaccccatctctactaaaaatacaaaaattagccgagcatggtggcaggctcctataattcctactcgggaggctgaggcaggagaatcacttgagcccgggggacagaggttgcagtgagctgagatcgcgccacttcactccagcctaggtgaaagagcaaagctctgtctcaaataaaaaaaaaaaattaatctaaaattactcttagtatttataacacagatactggctagaatttcagccataaagagcaaatctcttcctagttcctgaaaacacttatagaaaagccaatatattttttactgttgagttccttgtatattctggatatgagtcccctatcaaatgagtagcttacaaaaatgttctcctattcaacaggttgtctcttcactgtttcttttgctgtgtaaatgtttttcagtttaacatagccccttctgtctgtttttggttttgttgtctgtgcttctgaagtctcatccataaagtctttgtccagaacaatgtcctgaagagctttccctatgttctcttctagtagttttgtaatttcaggtcttacattaaagtgttcaatccatctggagttgacttttgtatacagtgagagatggaggtcatgtttctttcctctgcatattcttatccagttttcccagcatcatgaagagagccccaatgtacgttcttggtggctttgtcaaagatcagttgaaaatatgtggatttatttctgggttctctgttctgctccattggtccatgtgtctatttttatataataccaataccatgctgttttggttactacagacttttaatgtattttgaagtcaggtagtatgatgccttcagctttgtttttgcttagggttgctgtggctatttaggctcttttttggttccatacaaattttagaattttttttttatttctctgaaaaacaatgttggtattttgatagggattgcactgaaattgtagattgctttgagcagtatggtcattttaacaatattaattcttctgatccatgagcatgagatgtctttccacctgtttgtgtcctcctcaatttctttcatcagtattttgcagttttccttgaagagatctttcaccttcttggttaaatttattcccaagtatttttctttgatagctacagtaaataggattgccttcttcatttctttctcagctatttcattattggtatatacaaatgctattgacttttgtatgttgatttatcctgcaactttattaaattcattcatcagttctaagagtttttaggtgaagtctttggtttttctaaatataagatcatgtcatctgcaaagaaggacaatttgacttcctcttttccaatctggacgccttgtatttctttctcttgcctcattgctctgactagggcttacagtattatcttcaatatgagtggtaaaagtgggtatccttgtcttcttccagttctaagagaaaaaaaattcaccttttccccattcgctacaatgttagcagtgggtttgtcatatatagtctttattatttcaataactaatcctattaaaaatgggcaaaggacatgaagagacatttctcaaaagcagacacagaaatgaccaacagatatatgaaaaaaatgctcagtatcactaattatcagggaaatgcaaatcaaaaccacaaagagatatcattttaccccagttagaatggctgttattaaaaagacaagaaataacagatgctggcaagcatgctaagaaaagagaactcttatacactgttggtgggaatctaaattagtgctatggaaaacagaatggagatttctttaaaaattaaaaatagaaccaccatacaatccagaaatctgactactgggtatttatccaaaggaaaagaaatcaatatatcaaagggaaacctgcactcccatgtttattgaagcactattcacaatagcaaagatattatcaacgtaagtgtccaacaatgaatgaacggatcaagaaaatgtagtatatacacacactatggaatactactgagccataaaaaacaatgaagttatgtcatttgcagcaacgtggacagaactaggggtcattatgtttagtaaaataagccaggcacagaaaggtaagtatcacaagctctcactcatatgtgggagattaaaaaatggatcatatggagatagagagtagaatgatagatatcagaggctggaatgggtgtacgggggtggggggagtgaagagaagtaggttaatgggtacaaacataaagttagatagaaataagttctaatgcttgtaagcaaagcaagctgactacagttaacaacaatgtattgtggttttcagaatagctagaaaagaggacttgaaatgtacccaacacatagaaatgatactccagtgatggatatcccaaatactttattacatattctaatacacataccccataaatatgtacacaaatataaagtttgtcaaaaaaatgtttaggagaagtaaaaccaaaaccagcgtgatatctatgatggttggagctattaagtgttgcaactaattctttgttacatgtcttcctttgcagattcctggagaactgtcaaacttccaaatatttcaaagatgaaagaaaggaggaaggcagactccagtacttccttcccatccacaccctgtggaccaaccctactcagcctccttcatccactgcagactctggcttctgctcttggccttctcttcacccctaggggctttaactgtcataggtgacttcagagtccatgtgacactccatcaaacaaccttacccccaacccccctacccaacattcagttacctagtcccttccaatctaccacctgttgaactagaccagatctccccactttgtaggccctgtcccaggtcaggctacccccacctctagtctctttgcctccagcctcatcctctctcacacacactccatcgtctgctgccagagagagccttccataaaacacatctcaccacgaggctcccctgctttaaactccttcagtgacttcccaaaggctacaggataaagtccaactctcagtgctactatacaaagtccttcatgatctgaccctagttgacatttctattccagcactatatcctgccccatcctcttcccacggtcaactcccaaccattcctctaaattcagctcagacttcacatcctctgtagggccttcaccaagccctctatcctatcccctagttagatggcactcctgcttgtctcatccaccagactcttaactttttaagagcaaggactctgcctgtctgggtttatagccctccccagcctctggcacattgcctgcaactttgtggtgctcctaaaatggctgttaaatgtgatgaacttcctgaaatattaaacaaatggctcttaccccagtgtactctttaccacactcatcctcttcccacgtgggtctccctatgtgccccctacattcctggttcttgccttcccacatactaaagtatcttcccacttcccacccacatgttctttttctttttttctttttttcgttttttttttttttttttgagacagggtctggctccgtcactgggctaaagtgcagtgacacaatcttggctcactgcaacctctgtctcctgggctcaagcaattctcgtgcctcagcttcctgagtagctgggattacagatgtgcaccacgatgcctagctaatttttgtatttttagtagagacggggtttctccatgttggccaggctggtctcgaactcctggcctcaagtaatccacacaccttggcctcccaaagtgttagggttacaggcatgagccaccatgcccagccctacccacattttcaagtaaggcttgtcttgggtccagtttgactcacctcctcctgataaaccattagaaacaacaccccctcatacacctacctagttcatctcacctgcatagctttattcctgctgatgtcatctctccaattagtccagagaacctcagagaagcccagcttccttcacatccacactgagtccaccaagcacaagggcaccacccacaatcagcactgagtgctttgtcttgtaattcttcagctgaaaactacaacgccaggcactgagattacccagcctctcaggtcaatttcctctgacatttaagaaacacagcaaataaatcctgacattcttcttatattgtagaaaataaataatcctaagatattatttgacattaatttgataatagggaaaaatgaactatgcctctccctggccactttggtgaattggatttctcaaccgaaaagccaattatgggtccttcatatagataagtaatttatttgaaaggtctggaaactagatgataagatgctacaaatgaaccagctggagtacatatacttagttatagatcaatatggggggaggaggacgaaaggaaaggaaaagatttaaaatactctaccaggaaaagagataaattatgtcagcattcagatacatgagttagaagaacatttatttttaaaaaaatcctattgacatagtttctacatttgtccccacacaaatctcatgatgaattgtaatctccaatgctggtggtgtggcctggtgggaggtgattggatcacaggagtggatttctcatgaatggttcagcaccatcctgttggtgttgtccttgccctgaatgagttcttgtgagatctggctgtttaaaagtacatgacacctccgctcgccgcactcttgctccattctcactatgtgatgtgcctgctcccactttaccttcagccatgagtaatagcttcctgaggcctcctgagaagcagatgccactatgcttcctgtatagccatcagtgcaaatgatgagccaatttaacctcttgtcttataaattacccaatcttaggtatttctttagagtaatccaagaatggcccaacacgaaaaattggtaccaagcagtagggcattgctatagagatacctgaaaagatgcacacagctttgcaactgggtaacaagcagaggttggaagagtctggagagctcagaagacagaagatgaggaaaagttcggaatttcctagagactggttaaatagttgtgaccaaaatgctgatagtgatacaaacagtgagagccaggctgctgaggtctcaggtggaaatcaggaagttactaggaactgaagcaaaggtcatccttgttatgccttagcaaagaacttggctgcattgtgtccatgccctagagatctgtgggagtttaaacttgagcgtgatgacctagggatctggcagagaaaatttctaagcagtgagtaacttctcgtgagatctggctgttcaaaagtgtatgacacctcccccgacccttgctctcattctttccatgtgatgtgcctgctccggctttgccttccaccatgagtaaaagcttcctgaggcctccccagaagcagatgctgctatgcttcctgtacagcctgcagaaccatgagccaattaaacctcttttcttataaattacccagtctcaggtatttctttattgcaatggaagaacagcctaacatacctatgttaattcaaatatcttgaagatgtttttaagttattcagcaattcaaattgattccattccctcagctgatgacatctggtcaatccataataaacagctagactgggtgatgttgggatctccaaactgagacattagcctggaagattctaaagagtgacttatttaccatgagttctgaaataaaccggcatcccaagtgcaccttaaaagttacatactatgaaccaatatttaactgccttcattttagtggcaagacacttgatagcaaaaatgaaaataaaaactatacttttaaaaataatacatgagctccatgtatactaatatggaaagaagtccaaggaagcctgtaagtggaagagcaagcagcaaaacagtgtgcagatgacaatcaagtttgcagctcaataaatagattaataaagccaaaataatatgcgcgtctatgattctagatgcacaaaacatttctgaacatttctgaaaggataaatagcaagccattcacagtggtgacctctggagagtgagtgggagcagggcttcaggggatgagaaaataaacatttcactgttggaattcattttagcaagatttgatattccttctacagttaaaataaatttagttaattaaaagacaaaaagtccctgctttgaaattctgggtggctcttcatgctctagaacaagtctacatccttacgtggcatgaaagcaaaagctactgaccctcttctcctgatgacatggccatgaaacagacagctcctcgtgcccttgcactttcacaccttcccatggtactgagtatcctcatgcactgcctagatctgcctctccccgtcgccatccctctgcatttccaccaggcaaaatgatacccacattcaaaactagtcccagtacccctttctcacaaagcattctaataccctggctccatgaattagtttctctgttccacccaagagcacttctcttttcctcttgtattaggttccaaataaaatataggaagcccgattaaactgaatttcccataatagttaattttatattatgactgtgtcccaaatattgcaatatttttgcttgctaagtctgacacactgtttcttacccaatggtttgcactcatcaagggcttccacagttagatgcagatgtattcgcctccctaccccaagcccagaaagcaagcaacccaagtcttcagtaacacctgcaccctcagtacccagcaaagtggcagaagctccataagtttgtgtcacctcacctgtctcagggcctgaagacaaactcagggagggctagtctcctccccgaaaccatgtcttcctgctgttccttatcctttcctattagaaaaagaaatctgtgcacagcctgtgactccaaccactcctcgctgttctccatgaaatcatgaaagcctccatctcaagtttttgagaaacacccagggaacacagatagtaaaaaattctggaatgggtttttcaggcaatcaccctgacttcattttggcttctgagaacacagctcaccacacagcagtcagctagaggtcagtggcaccatgacctacatccaaatgccaacctcgagcggcagcttgtgagaaactggcacagcctccactccgtcccccatgggctgccagtacggaagtacggatgagccaaggacaacgatgctatcacagccttatgagtctcccatgctaagtgaaatcctcacttgacctctgtctgccacaacaggaggccattaagctgagcctttcattgtcttccctggcctagggaaacagtaataaacctaaaaaattaggcaaagcaccaactcttacggtttacaggttgggatcccagagaagcagacatctgtgggagtatagcaagcagggtgttcattaagttatgtctttgggatcaactcctgggaaaagaaggagactgaggcaggcccaggcagagggagaagtggagctgcagcaccgacccatggacagccttggccaactccacaggcagtcctggggctagcgtggcccttcagagttgccacaggttgggcacagatggccaggcttttatacccctgctttgagcaatcagggactgtgggctgcggtggaaagagctggcagctgaaggctgggccaaccatgctgcagcaacaagccctcaaagacagaggatctgggtggcaagcacggtgcctactgtaccaacctcccctttaaaatgatgctttataggatgcaccacacccaagtggcagcattcaccactacaccaactccccagcagaggcagagaggcctgagctggggctaccgagctagacagaaggcagatactttatttttttcagctgaaaggagaatagcctaacaatcagaagtgcctcagtacaaaatgagttaccttaagatgtgcagaaccattactgaagaggtttagttagaagctagagaaatccttatctgggatgttgtatggggagatttatatattcattcattcattccataaatatttagtgagaattaatgctttcacataccagataatagcctcagtgcaggaataaaatggtaaacaatacagtcccagcctgcatttcacagagaggcttagaagaaaaacaaaataatactctatcattttagattgtggtaaatgctataaagaaataaaggtatgtcatggaaaaggactaacaggcagaggcaaaggaaggcaagcagccagaaaagacctctctaagggggtgagatatgaacaaacacctgaacggggccaggcaaatggcccagataaaaaaacagcaggtgtaaaggccctgaggcaagaaccagccagagactttgggggaagggcaagaaggtcactgtgactgcagaagagagaaacggaaacaaagtagaagaagaggtcagaaaagccttgaggtggaggccaaatcatgccagttcttgcaggctttggctaaatggctaagacttcgaaacttaaatgtaataggaagccacagccaccaggttttgtgtacaggggagtggcaaagtcgtatttatatttttaaaaggcccctctggttggtgtgcatagactctagagggatggcagtctagcaaggagaccactcagaaggctacacaaaggatgctgggccagggtacaggaatggagatgcatccagatgactggggtggatcagaaagttccccaggcctgctgacaaacactactctctgaggagcccaaacccggacctaccaagtaagaatctccaggacactgtattttaaccacctaggaggttctgatggtcaactgggtttgggaccactgcgctagtttatctgtgttgtcctctgaggaactgggattctataagaatgtgaaagctttcacagttttcacattgtgagatgctgtttcaggtccctgtgagatgctgtttcactagaaggtggtttcatcccttcttctgaatggagcccaacccacctatccccaattccagaacaaaaatccagaacagactatgcctttagggttatcaccactgacttccaaccgaggtgctcctcttctgagtcctagaacaccaaagttatttgagtgactattttcccacttttcctaaagaaagtatataactagaattattccagaagcataggacagaagtcaactcattacacataacagatgccttactcaaggtattaggacttaattctatcttggaaccctggttctagttgagaaaatctggtggacaactgaaaaatttcatacattacaaaattcatgtcccaaaccataaaggactaaattttgctcaagaccaaagataataatgacactttcatggggaattttggatactccgcagaaaggagatttagggtcaagcaagatggtaagcggcctgagagtcaagctgaggctcaaggaatgcagcacttgacaagagatggacttggaagaaggagacttagcccatgacatcacctcacatgtaaagaaatgcaggtccagaaaggttaagtgacttactcaaagctcccactacagagtcagcattgtaaaaggaactcaggaactcagtaagcgatcaatacttcaaagccacaaagaactgctgagagcaaagctggcactcctaatctgatttcagctacatcttcctggagagggtatgtaagcttgggatcccaggggaacacaatgagccagccagtatatttagagaatccacacgattgctctccaaacagggtggaagtcatcaaatgcatcaggcactggacaggagaatcgagacgcgcacttagcctcatttcccaccacacgacccagaggcacccaggctcccctgtcccattccaaactgttccttcttgcaggtctcacaaagacccgcctctgtgagtcctgggccttgctcatgctggtccttctgcctggaatgtacctatctaatccaagtgacttatccttcaaagcccataaaaatgcttcctcagccgggcactgtggctcacgcctgtaatcccagcactttgggaggccaaggcaggtgaatgattggaggtcaagaattcgagaccagcctggccaccacggtgaaaccccgtctctactaaaaatacaaaaattagccaggtgtggcaggtgtctataatcccagctccttgggaggctgagacaggagagtcgcttgaacctggaaggcagaggttgcagtgagccaagatcacaccattgcactccagcctgggtgacaagagtgaaaagccatctcaaaaaaaaaaaaaaaaaaaaaaaacttcctcttccaggaagccttctcagacctctcctagccagtatcttctgggtgacattccataacacaccacagcagttaccacatttgacctgcttactgatgggctactatacatttgtcttccccaccagtgtacatgcttcctgaggccaaagatgatgtcctgctcttcatatatttcacaacacctagcactgtcctcatatacagcaaacacttgatgaatgaatgaatgaatgaatgaatgtataagcacatgaaagatcaaatgaaacagctaaaacaagatactattcttaaactcgagcactaaagttaaactcatacttcaaagcttaaacttttaatttttaaatgcagatagattttccccaaaaatatcaattaacttggcaaatgttaactccaaagacagaaatgaagcttgtttctccctgcagtcacagctgctgactctgactccaggagcaaagcgttgggggccttccatctccttctgagtatcttcttttgagtcatggaaaaaagatacggctgtgcacgtggccaaacttctttgatatgcttcctcaaaagacacaaacaacatactcatttttaaaaatggaaatttaggccgggtgcagtggcacacacctgtaatcccagtactttgggaagctgagacaggcagatcacttgagtccaggagtttaagaccagcctggccaacatggcgacacctcatctctatttaaaaaaaaaaaaaggccaggagaggtggctcccgcctgtaatcccagcactttgggaggctgaggtgggtggatcacttgaggtcaggagcttgagaccagcctggccaacatagtgaaaccccaactctactgaaaatacaaaaattagccaggtgtggtggcaagcgcctataatctcaactactcaggaggctgaggcaggagaattgcttaaacccgggaggcagaggttgtagtgagccgagatcgcaccactgcactccagcctgggtgacagagtgagactctgtctcaaaagaaaaacgtggaaatgtaaaagaggtattgcagaacataagaacattcatacttatttttgttttcctggattcagacattaaatcgactattcaatgcccaaagacatcctagtttagtgctgcagcactatgaaacacaaagaagtgtgttttctctgctcttcatccacatcactataaccctcttcccagttttatctctattctagaaaaatgttctcagtggcagcttacaaaaaaaaaaaatacaattttggcctataaaatggagttgattccttttgtaacaccaccagctaaatgccatataccagctagggaagggatactggtataattcaaactaaattgcaagactttttcttcaaaaagacttcaaatcatagtggaacaagatggaattttggtttcttgtcactttttcaccaagcatagtgcctaacatgtatattgccaagcacagtggtttaataattgggagagggggcactaggtttgggggacctggattgaaatcctgagtcttagtagctttgcgactttgggtacattacataactttgctaagccatggtgtactaattacacagcaacactgtggttattgagctgcactgatgtacaattttttgctgaaagatgtgatagaagaaaacagacaatataaggccagctatggagtcgatactcaatctatgtgttcatcttcatcatgaaatcaagatccctccatttattcagttaatgtttaccgtgtctctactatgtgccagctactatttgcagcacctggagataaaccagtggacaaaaccaacaaaatgatctctgggagcttacattctggtgtggagattcactttaacataacctttctgaccctttcccaaaataggtgcaagtggaatctagaaaataaatgttgccaagtcttctgcccagatatcatgaaaatacagaagcaccacacagctgactttgtaaaaatcttcaaaagctttgttcatgaaatgctttatctacatcaactcaatgcagaggcacaattcataaagataaggctaacagaaacacaaaaattctttcacttatttttatttaattatttatttatttatttacttcagatggagtctcactctgttgcccaggctggagtgcagtggtgcaatcttgactcactgcaacttctgcctgccaggttcaagcgattctcctgactcagcctcctgagtagctgggattacagatgcccaccaccaggcctggctaatttttgtatttttagtagagacagggttttgccattttgcccaggctggtctcgaactcctgacctcaggggatctgccggcctcggtctcccaaagtcctgggattacaggtgtgagccaccgcacccagctttcacttatttttaaattcttgtgaattatgtccagttattctgacgacatacagactgtcccacctaaagacacataagcatgctgtgtccttcctgtcccatgctcagcgtccgcatccatcacctctcctaaggcaagctggccatgcccactcacgataaatgacagagccaccatggccagaggcaggacaaacacatgcctcccctttacaaggctgtgagggatacagaaacattaatatcatggctcatgcccttagatggcccacaatcaccccacatgggtgacagcaaatggctagtgctgtcaatcaggcatgggtgcccacaccaaggagagacctgactttggtaagtgaaacaaagttagtccaaaaaagaagcgcaatcacattttttattctgggggaaaaggagtatgtcaccagaaagttcctttccagaatattctttgaaactgtgtcatatcaccttctccagtgcctccacgacctcagcttgataaagaactgctccccacctgcctctggtctcactctgagcatgctgctcagacacagagaatgctattccccacctgcactttctgaggagcgctgcaactcacgcaacacaaagaaacaaaacaggaagaaatagcaacactctaaacacatgcattattttcattttgctgtcatccaggaaacatcagggcatcaactgaaggcaagcacgctgaccatggtccacggcatgctgcatctggtgcatgtccggtaaaccaaatcccagcagggacccccaaccctggagttctccagctctgctgctcacaggaatctcctggggctttaaaaaccctgatgcccaggctgcaccccaaaccaattaaatctgactctctggcagagggaagcgagtgtcagctgagaagggtgagaatcagcgtcctaattcttgtttctctagctcccccattaaatgtttcagaggcacaattagtggcttatcccataatgagatgtcactaccaaagcctaaaggagaaaacaaactatgacacagatctgatcccaacagccagtttcaggtcttctattaaagaactgaccaaggctttgacaaccgctcagcctctgtctactcatccataaaatgaggatgagtcttgcctgctctaccacgtcagagggagctacaaggttcggaggatggattcagagtgcacatagaacgataaagctgacacagacacacgtcaccattcagcactaccagcccaggctgcagaagctcctttcagagctgtatcttgtagaacaggcatcccaaagccccaggtcatgaagcagtactggtctatgggcagtaaggaaccgggccacacaggaggaggtcagcggcaggcaagcgagcattactgcctgagctccgcctcctgtcatatcagcagcattacattctcataggagagcaaaccctatcgtaaatggcgcgtgcaagggatctaggttgcaacctccttattagaatctaactaatgcctaatgcctaactcctgacagcctgagagtgggcacattgcaaaaccatcctcaccactgtgccctgtccatggaaaaactgtcttcacaaaaccggtccctggtgccaagaagtctcaggaccactgctgtagaagatccagattcctggctatttccataccccaggagacagacccactttcctgatcttagtgaccagaacaggaccagcttgtttatgcagtaagtgagatgcaaggctgcttgtggcacaacgagacgaagaccactggaagatgcctccccaaaatactgaaaacactaatgctgtagaaaagcagcaaagggaaatggtctaaagtaaataaggagttttaaataaagtaaataaaggaaaagaattttaaaatactcattttcggttttttttttttatgtttttttttcgttagttttttttttaattatactttaagttttagggtacatgtgcacattgtgcaggttagttacatatgtatacatgtgccatgctggtgcactgcacccactaactcgtcatctagcattaggtatatctcccaatgccatccctcccccctccccctaccccaccacagtccccagagtgtgatattccccctcctgtgtccatgtgatctcattgttcaattcccacctatgagtgagaatatgcggtgtttggtttttcgatcttgcgatagtttactgagaatgatgatttccaatttcatccatgtccctacaaaggacatgaactcatcattttttatggctgcatagtatcccatggtgtatatgtgccacattttcttaatccagtctatcattgttggacatttgggttggttccaagtctttgctattgtgaataatgccgcaataaacatacgtgtgcatgtgtctttatagcagcatgatttatagtcctttgggtatatacccagtaatgggatggctgggtcaaatggtatgacttcaaactatactacaaggctacagtaaccaaaacagcatggtactggtaccaaaacagagatatagatcaatggaacagaacagagccctcagaaataacgccgcatacctacaactatctgatctttgacaaacctgagaaaaacaagcaatggggaaaggattccctatttaataaatggtgctgggaaaactggctagccatatgtaggaagctgaaactggatcccttccttacaccttatacaaaaatcaattcaagatggattaaagatttaaacgttagacctaaaaccataaaaaccctagaagaaaacctaggcattaccattcaggacataggcatgggcaaggacttcatgtccaaaacaccaaaagcaatggcaacaaaagacaaaattgacaaatgggatctaattaaactaaagagcttctgcacagcaaaagaaactaccatcagagtaaacaggcaacctacaaaatgggagaaaattttcgcaacctactcatctgacaaagggctaatatccagaatctacaatgaactcaaacaaatttacaagaaaaaaacaaacaaccccatcaaaaagtgggcgaaggacatgaacagacacttctcaaaagaagacatttatgcagccaaaaaacacatgaaaaaatgctcatcatcactggccatcagagaaatgcaaatcaaaaccactatgagataccatctcacaccagttagaatggcagtcattaaaaagtcaggaaacaacaggtgctggagaggatgtggagaaataggaacactattacactgttggtgggactgtaaactagttcaaccattgtggaagtcagtgtggcgattcctcagggatctagatctagaactagaaatatcattttcgttttttttccccctagagagcttgttaaaacacatgaaacattctttttttttttttttttttttttgacacagggttcactcagtcacccaggctggagtgcagtggtgcgatcagagctcactgtagcctcaacctccctaagctcagatgatcctcccacctcagcctcccaagtagctaagactacaggtacatgccaccatgtccagctaattttttctattttttgtagagacgggttttcaccacattgctcaggctggactcaaactcctgggttcaagtgatccaccatgacctcccaaagtcctgggattacaggcatgagccaccacgcctggccgaaacatgcattctaaactagaagttttaaaatagcatcccagggctagaacgggtgttctaaaacatttttaattagttgccaacatatttaaaataatattttacatgagagcctggatttcccacttctctcaaaacacaggaatgaaaatgctggctgatgtgatgaaaataatcaagcttactttgaacaaaacatgatttaacccagctaggagcacattaggtttgactgtccaggttttctaatttcttatttaggatttagtgaagaaaccaccagtgaggggctttctcttcttttttttttttttttgagatgcagttttgctcttgttgcctaggctggagtgcaatggcacgatctcagctcactgcaacctccgcctcctggttcaagcaattctcctgcctcagcctcctaagtagcggagattacaggcactcgccaccatgcccggctagttttgtatttttagtagagatggggtttcaccatgttggtcaagctggtctcagtctcctgacctcaggtgatctcccgcctcagcctcccaaagtgctgggattacaggcatgagccactgtgcctggccgaggcgctttctctctcctttcctcctgtctttccagtgtgggccgcatctctccagctttcattccttctgactccttgctggtgcctgtacctcccaaggccctaaaggtgtgcaacttttgaagaatgaggctgccaatccctggagctgtaaagcagggacaataatagcaggttcttatcattgaagaattcatcccagaatccttgaaatcgaatacactaccacagtttgcagacagaaatgaaagaaataaccttgtccttaagccagaagggcttgaggtaagaaagccctctgatatcatcagtgttccttgcaatcaagcatagacagagagcaacacaggcctggcctcatttctgtggctcagctgaccaaacagtctgtgcccaagaaagcaggcccccctcccacgacagctacaggagggcaaaggaaggctcaagttgcacctggtgggacagttacacctctaatttagacatcatttcaaagaaggagggtgggcgtgggggcgcggagctaacatataatgtaatgctacccactgtctgaggccaagagggctcatcttgagataacgtgatgacatcaaatgagcagttctacttctgttttactcacgtcctcaactctcaagcatcactcttccactcttttgtgattaatcatgccttttaattcagccttgtctctcctgcacatggacacttcctctgagtcccccttaggtttcatggctctgtctgcattttcaaagcttgacaaacccagctcagcacttgaaataggaagctccctaacacaaggaagcctttagcttcctataagtcatacagagaagggaattgagaacagctacatgtgcctctgaaaataaacaagtggataaaatcatatcacgctgaagccagagaactcaaactgctggtatcatcccagcatatgcaatattaacacgcagccattatgagcttcgttgaggttttcaggtgaggcctctgggcctcccacatgctgctccatccaccactacacctgttgtcccaggctagtctccacttcaggtctgtctctccaagtacccttcctgatgccacaagtctgttagacccaaccccccaccatgggcttccacagcaccacagcatccagtacaacaaaggcaagaactgtgcctagcttggagaccactgtatcctgacacgcagcccagaggtttttaaaggtcttggggggctctgcaaggttaaaattattttcattatgacaccagcatattatttgtctttttcacactcacatttctgatagctaaggaaatatgtgcttatatattcctatgttttaactttctattttaatttattatttttttttaagacagagtgcagtggtgtgatcttggctccctgcaaccttctgggttcaagcaattctcctgcctcagcctcctgagtagctgggattacaggtgcctgccactacacccagctaatttttgtattttcagtagagacagggtttcatcgtgttggtcaggctggtctcgaactcctgacctcaagtgatccacccacctcggcctcccaaagtgctgggattacaggcatgagccaccgtacccggcctctattttaatttctaatgtggcctcccacctctccagtctccactctcaccacccatctgaagtttcagccatttcgtgagactttgtagctcacagtcatactccagagcctggggtctctgtacgctttctgcttaaaatgctactgccagccttgtctgttggctgactcatcctgccagggagccctgccctcagtgctgatgtcctctagggtgtttctccagccctcccaaggagctctactcaatgcctcctgacccccacgctgtcacgccttgaatgcaacattattaactagagaacttgtgaggctttctttgtttctgttgttcccacaagatcatgagctacttgagggtggggatcgtacccttactcatctctagccaagaaaagctctgtggcttttattgagcccaatggagagacagacattgagcctaagagagtatctactgttcaccagctaagcctatttggacctcaatagctcaacttcccccaaaacaccttgcttgtaaacataagctcacattgatgttcctttctccagacacctactgtactttactatctacacagcagaacttagaactcagtgactagtagactttgtctattcattatttagttatgtaagattcttctccacattcatagcaacagtggtccacctgcagcaaccgctaccaagacgctggctacagcgggggaggtgcagctgggctgcatgctccacagagccagcaggagccaggagcagacaggagcagacaggagcagacaggagcccaaagcaggaaggagtcctgcactgtcgcagcccagccaggtgtgcgcacacttagggaagcactgacatgccagtccacagccacttcagccccctccagacttttagcactgatgagcatgggagggaggctgaggtggggctgagggcagctcagcgccggcctgcaggcaccccttggcatgaacagcctgggcaccatgaacagcagcaggagacaggcaggctcctgggtagaaagaaggaggtgggtcctgggtgaagccccagcttcaaactgaggaggacatgaagcctgcggaccaggctgccaatcctgcagagtggagtgggaacttgtggttttttgccgggcccacccatagccacctatggaccaatctgcacatatttcctcccctatgaggcccataaaagcccaggattcagccagactcgaaaagacaatgacctgccagctgccgagaggatttacccactccagggtctcctctctgctgagagctgaacattcaacagatgacctgcctgcagagtggagctacccactccagggtctcctctctgctgagcgctgaacgctcatcgggacaccctgcctgctacccagtgcgggtctcctttgagctgtctgtcgctcaataaagctcctctttgccttgctcaccctccactttcccatgtaccttattctttctggacacaggacaggaacttgggacccatcaaatggtggggctaaaacagctgtagcatgaacagggccaaaacatgtcccttgctcaccacgttgcaggcaacaaaaaggagagaagaggggagagaagagctgtggccctctagggagcccaggcctaggagctccctgagccagggctgtcacaccctctttggggctctgtggtttctggtgtctccgaacttccaggtgctaccacattccccagtgccagccacggaagctgtttgcagtacatctggtccagctgcagccttgcagggagctggcgcccatgccagcacctggagttgcccaccccactgcagtcagcacgcctggctgtgagcagtagctggaccccacactcgctcacacaccctttgccgctccatgcctggcttgcccttggcaggcatgggatccaggctggtagcacaagctgagcacagcctgccaggctgagtggacagaatgagcctgagcaaaacttgggcaaaggtgccactggccacaaaggtttccagctggcaaaatgacaccccaaggatcccataccaacatcaccacaatattcatgtaaaaccctaggtacaagacaaaattgtaatgttgcattcattgtgcttactctgtgcaagcacttcacagccattaattccttaagtcctcaaaataaccctatgaataaggaacatatgatcctcctcactgtacagaagaggatatgagacgaaatcagaagacagagtgccacgtataaaacaatgcaggtggttagtggcaatggcaagatgtaacctgagaacctacccttccacatgcatgcctctgccacactctgcactgtactgggcatgatgcaaaagttcgggattatgaggctaatgacatccccaaagaaaccttactgacttaatcaagccatagaccaaaggccatcctccaaggaaaagctcataaaaggaaaaagcagtttctcacatgcagaaagcacttaatgtctgctgaccagatgaataaacaaataaaaacaaagcaaatcaataaatacaaatatgcttcaagggcttaagaagatggtatagaaaaatacatcacctttattcagtactgattagtgatagctacctctcaaaagtcagagaagggaaaagggaaaagggggaagatggcaaaaacaaaaacaaccacaaaattttctcattcttcaaaatcaaaacagaaaggaattcaagccaagatcaaatcaaagacaatcaaatcagtttcatgagcacttaggctctagagaaggaggaatggattatttctactgactcattaattcatttattagtcattagaaagggcagaaaatctgaaaactatttgttggtagaaaacataggctatgttaccctggaaacaaggttcccttggggaaaagcttgccttggagtattcctaaattccctcctttaccatcctcccccttccaacactgggccactcattagacactgataacatcagcccccacctccccagctcatcttcagaggtggtccagtaccaacagaataaaggctgttcatctcagcactagaagaaacttacaggtcacttgggtgcaacttctttacatgacactctagctggtgatcagcctcaccaaaaacaaaaacaaagaaacagcacaaccaggtggtatcacacctgtctcctcaacagaatggctctccacattctcacaccgctctgccatgaaccaactggtcactaactggctacccggagactccagagagcaaggactatgcccactgtggcctcgatgcaaaacacgatgctttgcactctatatgtggtcagtaaatgcttgctgagtgaataatcatgactgtatacatccatgcctcttgcgcaaatcactgtgtgtctattcttgccccctgggattctgttctccattagcagcacaagtgaccttttgacaacatatgtcaggccaacacatgttctcactcctccaatggccctaccacacttaaaacctaagactttaggtggcttaataggccctatatgagccacacttccctattctgggcccacagacctccctgcacccattgcatgttccaggcatgctcctgacacacagcctctgcactggctgttacttctgcctagaatattcttcccagatattcccacggttcattaccttacttccttcaccaatcacctacacagccagtccttccctgaccactgttatctgtggttagctacccctttactgtgctttattttctttatagaatgttcccacttaccactaccttatgatcttttgttcactcactagacctgtgctgtccaatatggcagctactagccacatgtggctactgaacacctgatatgtgactaatccaaattgagctgtgctgtaagtacaaaatcatgccagattttaaagatgtatttaccatgaaaaatgtaaaatatctcattaatactatatatagtattaatattaatcattaatattaatcattaatactatatatattaatactatatatatatacacacacacacacatactaatactatatatatgttttttgagatggagtctctctctgtcacccaggctggagtgcagtggcgcaatctcggctcactgcaacctccgcctcccaggttcatgcgactctcctgcctcagtctccaactagctgagattacaggcgcctgctactacgcccggctaatttttgtaattttagtagagatggggtttcaccatgttggccaggctggtctcaaactcctaatctcaagtgatccacctgcctcagcctcccaaagtgctgggattacaggcatgagtcactgcacctagcccactgtgcattttttatgtataatctaccccatatagtcatcacagtaacaccagaggaagagggcaagaagggaggactattaaagtcatgtttcagaagaagaatctgaggctcagagaagtacaataatacatccaagctcacaaaatgagcaagtggcagactcagaatgcaaacccatgtcttccagcctcagcccctggcacctggtcctccactcgaagcccaggctggcagccagcagacagcatcatacccagagagagtatctgtttggcctgcatggtttccttgtttggttgtttgtttccgctaaaatccttgccaatatttgaaaatttagggattttaacagtacgggttcccatttttcattcaacacctgaacacttggtacacgccaagcacaaggagcataatccaagaacaagacagaaatggtcccagtgctcacagagggactcagactataaaccagtaagtaaggaaaatacctaagaggccaaattttgataagtgctgtaaacgaggaaaaatagaggggggacaggaaacaccagcaatagggggcactattttcaatggaataactgagaaagcccacattgaagaagcgacatttgaacaaaaactcaagagagaaggagtgggagatgcggacatctggagaaagaacacctccagcagacgagtggcaggtgccgaggtcctgaatggcatcactgatcagaatggagaaacatcatctctctagacacagagtgtggcagaaagagacaacttcccctgttgggtatagaattgttactggaacgtggctcctagccagtaacaacaggttcccagccttccctgcatccggcgtggccatgtgactattctcaccaatgaagggtgagcattattgatgtgtctctcccacaccaaagcagccaagaagaaggtgtgcctcctccaccctctcccctcttccgctggctaagcagagaagactgtgaggccccagaggtataaaagaggctccaggatatagaagaaaaaccacctgctgaccaggaactgcagatcatcatctgtttacatggcaaaagataaacttctttggtatctttagtgagagccacgaaaatgtgggggtagggtgggtgcgatggctcacgcctgtaatcccaacactttgggaggccaaggcgggaggattcacttgaggccaggagttccagaccagcctggccaacatggcaaaaccctgtttccattaaaaatacaaaatttagctgggtgcggtggtaggcgcctgtaatcccagctactctggagtctgaagcacaagaatcgcctgaacctgagaggcagaggctgcagtgagcccagatcatgtcactgcactccaacctaggcaacagagcaagactcaaaaaaaaaaaaaaaaaaaaaaaaccaagtgggggtaaatttgttatggaagctagcaagtgccctccacagcctattatctccctgattgtgaagatgaaaatatatttatttttatttattttctcctctctgctcacggtttctaatgtggaattattccaggtctgcctggtccctataggcattgagtttgcaacccttgtactatatatttaactaattctgcctaaaaccaatacttgccacaccactgagacctgtcttcctccaactcactctaaactccaaccctttccatcccaccaagaatcaaaatgccccacgtctcatttgataagtgaaagtaaacaattaatccaatcaaggtgttaacagcccaaattgcctatccatagtccatcaaaggatgccaggaggcataattcctcaatcttttgaatggacagaggtattctggaggaaatgccgtctactcttaccctaaatatggttatcagcataggcaaagttgcccctaataccaaaaaaagtcttaactaagaatgtttcacacagctgggtttaacaaaaacaaaacagcaacaacaacaacaaagactgtttatgcctgtaatccccacatgctgggaaggccaacacagaaggatcacttgagcccaaggattcaagaccagcctgggcaacataaggagaccccatctctacaaaaaaaaaaatttaaattactaatagctgggtgtggtggtgcatgattgtagtcccggctcctcaggaggctgaggcaggaggttcacttgagcccagcaggctgaggctacagtgagctgtgatcatgccactatactccagcctgggtgacagagcaaaaaagaccttgtctcaaaaaaaaaatgctttacatgataataaaatgaattttgttatcttggactggatcctggaccagataaaagacattgctggggcaatctgagaaatctgaataaagtctattcagatttgtattcaaataatgatacaacattcaaataatgttgtatcaatattactttccggttttgataattataagatagttatagaagaaaagaacattcaaagaagttgggtaaaaggtacatgggaactctgtattatttttgcaaattcttataaatacttcaaaataaaaagttaaaaatatttttaaaaaaagaaagaaaagcaccttaattgaatcatcacatgtgagcaccagccaaggaccactgataccttctcacaagggcccatctacctcgtcaaatgaaaacaccaactttagggaaaaggatgagaacagaccagatattttcgtaaagccttatctggcaaattgattgaatttgagctagtctccatcacctagaatcattttttcttgacagttccctggggaacttttaagtcctgctctgaggaagttcacacagtgacttaactgtgtcccaggcagaatccctgtgatggcttagactttgtcaataagaatcagcaggtgcagtgaggtgagaccacaggcccctggggcaaaggacaccaagttcctgagagcaggcatcccatggagggttcagaatcctacactcttaaaagtttaaaatcttgatctgagcaatggctcaagcctgtaattccaacactttgggaggccaaggcaggcggatcacctgagctcaggagttcaagaccaacctaggcaacatggtgaaaccccttgtctaaaagaaatacaaaaatcactcagctacttggggggctgaggctgaggtgggaggatcgcttgggcctgggaggtcaacgctgcagtgagccattttcgtgccactgcactcaagcctgggtgacaaagtgagatattatctcaaaaaaaaagaaaaaaagctctaaccagctaacaagaggaaacggaattggcagtcactctgacggcatgatgtctcagtgttgtctcgagtaacaaaatcagattttaccaacttcttctctggataataaattcacttcatcagtgtttttttcaaactatgaatcataaaatcattttagtgagtaacaatcatctttttttaaaaaaatataatagagaggccgggcgcagtggctcatgcctgtaatccctgcgctttgggaggctgaggtgggtgggtcacctgaggtcaggagttcaagaccagcctagccaacatggtgaaaccccgtctctactaaaactgcaaaaaaaaattagctgggcgtggtggcgggtatctgtaatgccagctactcaagaggctgaggcataagaattgcttgaacccgggaggtggaggttacagtgggcagagatggagctgctgcactccagcctgggccacagagcaagactctgtctcaaaaaaaagtagtagagagtagaaaatatcagcatgcattgagcagatgaatgtcttactgtggatcttgtttgaagcacatagttctatacaatcatcatcagccttccaaaacataagcgcccttcatttcaaataatatgacaaatcctttctcactaagtcagtgggaaaaaaaaagttttaaatagttcttatattcacaataacttttattagaaaatctgaggtgtgttgccatgaggggaaaattcttttgcaaactgaagtcaaaaattttaagtatctcccccaagatatttattaattacaaacaggaaaaaaaaaataaaacattacagtggagaaaccctgcagataccaccttaaccacgtaatcaaggtcaacatcaccagtagtaagacatattgacatcacataccccagtaacatatgaaggacacaaaatcacttttgtggtattattgtcaaaaattgcttaacttcaacgtatttgtgataaaacatcagagaaagccacactgagaaccattctaaaaaataactgaccagtactcttcaaaaattaaggttatgaaaaacaaggaaagacttacaaactgtcacgtaccagagaagactcaggagacatgctacatttagatgcaatgtgggatcccggattggatgctgaaccagaaggaagacattagtgggaaaactggtgaaatctagataaaatttagttaatttcttcgttttgatcattgtgctgtggttacataaggcataatattacgggaagttcggtgaagagtttatatatgggaactctctactattttgcaactttactataaatctacaattatttcaaaataaaaattttttaaaatatcttttctgaagaaagaaacaagagtattctgccctataaactgtgtatcatttaaacacagtaaagtgttgtaccatagtgctgtacctccaactctctaaccttaagggataaacataatgtgcattggtgtgtaatatgaagtaatcttaatcttcattgggagtgtaatattaagtaaacttaatacacgggaaagagctgaagctgtccttgtttacccaggctcttgctcagccctccgtcacccctcacgtcttcctaatacccaataggaggattgtcaagatgctcttttcctcctcacggagaacaatgtgagacatgcaacaaacgccgtgactacggatcccaatccctcacgagcaaccacagaaagtaagaggcatgtgtggagggtgagtggagatacttataaatgtaacaaatactttctgagtgctcaggtcttcccggcacagttccaggccccggggaaacagccatgaacaagatctacacggtgactggctctcagagagtttaagagataataagcaaacaaaaatatattcacacatacacacacgtatacattcataaaatggggaatgttagcaagccagaaaaccagagtgaggtaataaagccttctctgaagacgggcatatgagacagaacctgatccttctttgagactcagtttcccatctataagacggatctaatgatgttcacccctgtagaactgttgtgaagaagtgaattagatagtacagcgcaggatttagcagaattcctagcaagtgaatgagtggccagaaatagtaatgagtgaccaaattactgatcaacaattacattgaaagcattaactttctcaatttactttaaattctacatatcccactgaaatgtacttaaagtgtctataaataaatgactgatcacagaaacagctatttcctatctcatggacagcaacaatgaaaaatgaatacatttggaaatggacagagcaaaaaacacaaatgctccgcccagggataataggagtgaccgaaggcaagcttcctggccccactggtggttacctcctttgtgcttggatgaatgtgcgggctaagtccaagccagtgctgaccaacctccctggaaggattttttcccctgtctttttataacctgaacgtgaggaaaggcagtcaaagccaccaaaataaatctctcagtcctcaggaaggagctaaaacactattacttcttttcccaggctacaggtctaagtataattaacatattctctttcacaaaacaagcttcagtaagatggcatcccaattccagaatctgcaaaaacagccaaagctatcaaaataacttagaaaaacagtcaagaaacaaggaagtatcacatcaatcaactttagaccaaactgctatatatcacacaactggacatttctaaataacttctctctctctgacaggcaaaaagaaacacatacacactcgatctctgccactccactctctcccactccactctcatgctcacacagtttccatgtttaaaataaagcaacagaagtttaaaaccaaattatgtgacccaagtcactcaagagcaccttttaaactactaatacaccttgtataagtgtattttgcacacaaagatattttaaaatattgtataaggaaaaataccagacatttgcatcatattacttataaagttcacctaaaagaaagaaaaaacttccatgcgctcccaactcaaggtgtcagcaacagcagcaactctcccctcctttctctttccagccagcagccccttccctcccttgctcctccagccttctttcaccaaccccaaactccctgttttctttttctcttcttcaaaacaaaaagagacaaacaaaaaaatctgtcttctgctgagcctgggtttgtcatgtccaggtaagggctgggatccagggatgcagaccaggccatgcctcaaacatggagtaaaaaagtttcaaaagattacaggagtccttgcggtaatttgctgagaatgatggtttccagcttcacccatgtccctacaaaggacaggaactcaaccttttttatggctgcatagtattccatggtgtatatgtgccacattttcttaatccagtctatcactgttggacatttggcttggttccaagtctttgctattgtgaatagtgccgcaataaacatacgtgtgcatcgcaaggacaaaaaaccaaacaccgcatgttctcactcataggtgggaattgaacaatgagaacacttggacacaggaaggggaacatcacacaccggggcctgttgtgaggtggggggagaggggagggatagcattaggagatatacctaatgttaaatgacgagttaatgggtgcagcacaccaacatggcacatgtataccatatgtaactaacctgcacgttgtgcacatgtaccctaaaacttaaagtataataaaaaaaaaaaaactgaaagaaaaaaaagattacaggagtcaacctctgcttagatgaacggaaatgaggctccctccttcctttcatctctccattaactggaagggcagcaacaggctacctccaatgccctcacagcccaatcacactgcacaagcctcccacaaccatggcactgcctcccacccctccacagacttgagcccgaccacctgactgtgcagcctctcacactggcgaccttccctcctcccaagccttgagccccctggtcaggcgtgacattctactctcctgccttcctcccttcctctctccatgccccttctctctccaacttgatcctccactcctacctcctgaaatctggctgtcagtaaccatagtgagtataaaagataatagtaactatgatttagtggacagttattatatatttatttatttcatctgatctcaactacttatacagcattattttatggaagtggttctcaaatgttgtggcctcaggacgcttttataggcttaaaaaattactgaggaggctcaagagcttttattaacatcaattatatctactgatagttaccatgttagaaattaaaactgtgaaaattttaaacaaaatgcacagcccatagagccgtgacatcatcacacaccatgtagtttctggaaaatttgactgtaccttcatgagagaatgaaaaaatggaatataacatcttagtagtactgtgaaaacagttctgacgttgtgaaccccctataaaagagtctcactgatacccagttgtccctggaccacacttggagaatcactgttttacaaaacagaacctgagccttaaagaggaaaatcaacttgcccagtcactcggctagcccactgaagagctccagcctgaacccggctcatgcagcactgctgttaccctttctctttctgctttacccttcctgagagacagaattcacttccaccacagcaactatcaccttccagtgacccatctgcaaatgcgcatccgcagagctgataactcacctgagtttctactgcccggagttcccaccagcaccccgaaacaaatcaacagaccaacacgcccttctacccaccccaacccgcgtagggccagcatcactgcctttgggaaaggtcattcttccacttaataaggccccaagccactcagagtcatctttgactccccacttctctatgtcctgctgactggtctttagaatgtctcttgcaactgcaaaaagcaggatatagaagtgtgtacatgacgacgttcctacacaaacaggaaaaagactaggtgcaaacgcaccaaaagtttatgagtagttagctccagatcgtgggattatgagcaatttgcgatttgatttcttcggtatatttttctgcataacacatacgtttcataagcatacattattttcataatcagaaaatacagtgattgcttcttcagggctttgtttataagttttgtcccttgcctctgccttttccaattataaccatgcccagaatccaatcgccatgggtcatatttcagttctctttactgtcttcctgcactggttgtcagcactcagacagacatcttgaacctcagtcttgcgtcacggagtggtggcaggaaagtcagggagataataatgcataaaaggcactttgcacagcccttggcaaatggtaaataaaagttcaccattactggtgctagtattattatttccctacactactattagatgaaacttcagaaaacactaattggcgaaagacagccctgttttagaaccatcagtagctcacaatgcctaataatatacctgatatttacagaacgcttacttttgggcccagcactgtacgaaatgctacctcattaaattaccattccagccccacgaggtgggtcctatggagatctccattttacagatgaagaaactgaggcacagacatgttcaataaagtgccaaggtatggaggtagaaagtaaaagagctggaattcaagcctttattcagacttgctgcacaagagaattttccaggatggtggatatatttatatctacattattgaatatgtgtctgttgagcatttgaaatgtgcctaatgcaattaactaaaatcctttttttattttattttatgttaacttaaatagtcacataggtggccgacagttatactggccagcatagggatctagagatcaaaaacccaaatgcccaggcttcacaaagaaaagtcctcacaacaccctgtctacctgccttgcaactaattcttacaaaatcttcaatttgtctaaaatcattagtgaaataaacatgttcctaccttccaaccaccccctgcccacctctcaactaagtcttctgtataatgaaaggactttaggaagttagagtaggggagacttggattcaaatccagcatcatagtatctagctatgtgaccttgggcggtcttatttcttatttctgaataagagacctccttattacagtctctgagcccttgttcctcatctgtagaatgggctgacaatgccaacttccaaagagtatcagccaagcacctaacagaaattatctatatggtcgctggcaatatcccttcagggctcaactcaagttccaccctcttatctaaagagatggcagaagcactggagatctcttcctctagcctctagaatcccctagaggttccatctcaaccgtacacagattctattgttatttttgtgtgttgtgtattctctgatcggcatttccctgaggccatgggcttctgtcatctgtaagcccagaggcaacgtcactacataaagggctctgaagggaaccgaagcagctggctcaacccagcattattatctgaggggtctcagtctcccctggcttttataggtcagtcaattggtgagaggaggaaatgcaattgccaaggtaaagaaataagcatagggctggcagctcacgcctgtaataccagcacttggggaggctgaggcgggcggatcatgaggtcgggagatcaagaccatcctggctaacacagtgaaaccctgtctctactaaaaatacaaacaaaattagccgggcgtggtggcgggcgcctgtagtcccagctactcgggaggctgaggcaggagaatggcatgaacccgggaggcggagcttgcagtgaaccgagatcgcgccactgcactccagcctgggcaacagagcgagacttcgtctcaaaaaaaagaaataagtgtagtacctggtacctggcagtgccttgacagatacttcccgtccttaatacaagacatgtctgtcctcatcatcacagacctaagaggctaaccatgaactactttccctttgacctatcttctttttaaaagaggaagacgtcagtacaccctaaagatatcaaatccaggcaaaatgccactggtggttttttttcttctttttctctcctgaacttgatagacttgatactagattctacctgagaggctaatcaggaagaaaggctaggaacagtcagaaaagagaaagaatggggtggatttgccctatcagataagcaagcacattatacaacatagctataaagctggcacatcaccagcactcagtaaatattttttggcattttttaaatacttgtttttgaataaagttacaattattaaactgtaaaaataatagtaatgacaacaagcactcttcagggagcccctgctgaatgccaggctctgtgtggagagctttatccacatgcgttatctcacttgaacccacaacagtgtttttcacacccaactgcagctctttcgtggatcacacctgtaatcccagcattctgggaggccaaggtgggaggatcacttgagcccaggagtttgagaccagcctgggcgacacagggagaccccgtctctacaaataattttaaaaattagccaagtgtggtggtgtgcaccaatagtcccagctactcaggagcctgaggcagggagatcacctgagcccaccaggaggttgaggcttcagtgagccacgactctgcgccactgcactctagcctagacaacagggtaagaccctgtctcaaaaaaaaaaaaaaaaaaaaaaaaaaaaaaaaaggcatagctgtgactgtcttaagaaactgactttgactttgagcaagttaactatgtgctatgatctgaatgtttgtctccccctaaaattcaaatattgaaacctaacccctcactgagatagtattaagaggtagggcctttgggaggtgattaggtcatgaggtccttgtgaatgggattagtacccttataaaacaggcccaagggagtctgtttgctcctgccacgtgagtacacagcaagaacctaccatgtatgaggacctggctctcagaagacagccagacagcctatctgctggcaccttgatcttggatatcccaagcttcagaactacgagaagtaaatgcttgttgtttataagccacccagtttacagtattttgttagagcagtccaaacacactaagaaactctgtctcccaatctgtaaaatggcataacaataatgtctctacctgccaagatggctgcaaagattaaactggattttgtacctggagctaggaccagagagtctggcacagagtcaagtctcaataaaggtggctaccattttgcctacgtaacagaatcacttccgcatttgaaatgagtattactgccacataattgaaagccataaggcaataaaaataaactcatcacatcttggcctgaatcaagcactcatattccttacaaggctgactgattactgcaaaggcccctagtttagaaactcagtcaaactcaatactccaccaccagcagtccttactttccaataactctgggacttgtttttctgtaggttgctttccctttgcctgaggctccactactctaaaaataaacattaaaaacattaacaacttccttcaatcctcctcacaaccaactgaaacttctccagtgccaatgaattttgtaggtgactttttaaaattacctaaataagcactgctgggttaataattaattctaagtattaattataaaactacgcatgaggaaagtaaaaacaaacagtaaaaaaaaagcctttcatctttgcctaatggattcatcatcagtcctcctctttagaggtatcagtgttaggtttcttacaaaccattacatatagatgaatctgtgtgtgtgtgtgtgtgtgtgtgtacatttgttagcacacacaaacacacaactttactccactgtggatatcttgcttttctcaatcctctaccttggaactcttttaagatcaacaccctctttttaagacttgcataataatccaccaaatgatttacgctataacttaacaaatttcccaattttgtatattaaggtcacttatgattttttgttatcaatgatgatgcaaaaatcatcatctttacacatatatctttgtaggcagcaatataatccatataataaaaattagaaattagaaaaagtagaaatgaaatggtcaaatcaaaaagtttatagatttccaattttttaagggaagcattttctgcttaagtatacagatttctaatcttgacagctactgtcaaatttcccaatatgaaagtttcagatgttttgatcccttatgcttccgtgatcaatgcagaggcgtctgtttcatcactcctgtaccagcaattggtgctcagttaatatttatcaatctcactggtaaaaaaatggcattttatcactattatagtatgcatgtctttccttataaattaggtcaagtatattcagttgccaatttatatatctctttctactcactgccaacttctgaatcattgactctccttaaaagtactgttgggaaggttatcaactagccttgtcttcaagaccaaggacaccatcttattctcatcatcctggcaatatttgacactaacccccaccacctccttcaggatgctcttctccctttcctgccatgaccatttgctgtgctggttctcctttacggactgcaagccaatcttctccctgaaatcctaaagaggggcatatcccaatgtccaatccctggctcccttttcttctcacgtaacatccttaaattgtggtttatgtgcaaaagatttccaaatgtcgatcctcaaatcacctgagacctaaacccacattttcagctttctgctgaacatctctagcagagggatggatgtccttcccacacttcagataatgaacaaggtcaacatgcgtgaaacacttgctctgtgcttgtacttgacacttaatacatctcatgtaactctccacatccaagagagaacataccaacttcattgtccaccttcctcaaacctgttcacctccttcagcatcaaacctcagttaatgactctacactcgcattcttcccccttcttcccatccagtgagctgccaaatcctgccaattctgccagtgagtggtcttcctgtaactatcctgccttccaatttcatctctggctcaaactgctaatcacctgcctcttacctcaatcttgacaccaccagagttctctactgagaatataaataacatcacgcgaatctgcctccccaaagcccatggcctctggacttatttcctgccatccctccatgtacctgggctccaggcctacactggcaaggcactgaactcacagttcctgtcccagcaggcccaatacttcacaagattcatgccagtacataatccctctctcaccatggctcaccaggtctcattccccttgtatcccagacagcaccctgaggaatgctatgtgtttggtaggtgcttaacaaatacttttttttttttttttgagagggagtctcgctctgtcactgatgctggagtgcagaggcacggtgtcggctcactgccagctctgcctcctgggttcacaccattctcctgcctcaacctcacgagtagctgggactacaggcgtccaccaccacgcccggctaattttttgtagttttagtagagaaggggtttcaccgtgttagccaggatggtctccatctcttgaccttgtgatccgcccgcctcggcctcccaaagtggctcccaggcatgagccaccgcgcccagcctaacaaatactttctaaagttacacaatacaattttctagcatgtgttcacctttttccaaaaaagaaaaagaacttctatacacatgaaaatccataataaagaaaaatcgttctaaagtttatcttctatgatggaatgtacacagaaacaaaaatattcccttagagcaaaaaagtcaaactcttactctaaacagctttagaaataactcaaaagtcacaaaaagcagattctgaaaacactgggttttaatgattacaaaccaaaataatgattccctacttgccaagagaagaaacagatttagatgagtcaaataaggttctggaaatcttttgattttatggccttcggctgccccaatcaggcatcagaactaccaaacattaacctccacaagttgatatgacaaaagcaaaaaggccctatggtaagtcaaatatccaccaacttggtagagaagtcaataaaatcaaatggctctgtgtgaaccttgcctgtcaccttggaggacacatcccatttctacctcattctttgaagtcaaaccaatttaaaaagtaacttttccaaagaaactttctaaacggattaaaaagaggtcattgaaaagggagcacaggctatttttcagtgaatgaagagaaggattctgaaaaagcattacttcgtagaaatatataacaagattaaattttgtgtgtaacactcttcctctctcttaatatcagagtatttcaaacacgtgtaaagcgtccctgacttttttctaggagtcaggactttgtcaaagttttcccatccactctctaacatgaagttaggaactgctaagttatcgattagacattcagggaatcaaaatcatctctaactgaaagattaaaaagtagcatggttaattgttaagagaacttctgagttggtagaaatgaggggttcacctgacagttcgtggtgccccccctcagcactctcaccttccccccaactattttacatcttcatggtaacgttcccttgatgcttttttaaagggggaacaagaacatctcaagttaatacgatggagagagttaatagaatcttctcctttaccaccagggtcctctccagggcaatgtgaacgggacagcagtgcacgaagtcctccaggcccccagaggccacagcctgggcccggtgggccagggaccagccggtgacacttttaagtccaggctggctttgggggagctggaaacaggcttcctctgggtgggggcgcgacgagggggcggggcgcgggcggccccactcacctgcgattcatgggccggaccctcacggccaccttgaccgatgccatcgctcatcccgaaccagcccgcgcggggtcccactagcccagaactccgcggtcgccggcgacgctggctactcagatcgcggctcccgcccacttccctctcgcccccgcccctctgctcccggccggacctggagttccgcggcagccccacctgccaggccactgagcatgcccagaacggctccggcccgcgtgatccatgcgccacggtttggcggcggccgggcggtgcagaggggcggggccgcggggcctggaagcagcctccgggatctgcaagtctggaaaggccacgttgtggaccttggcgcagaggttatgggggcgacccggagcggatggtttcaggaaaactagaacccaccctcatggcctgaacaactggagagaagaggatcgcagcaatttaaagccagcggcaaggatcacagtcctggggtcaggtgaccaaagccagtttttcagcccttaacaagaacctggcttcacccagccaaacatgagttaacgtatccattttacacacgaacaaactgaggcgcagagatgatcacagcttgttggtggcaaactccgctagggccttctctgctaccctaaggaggtccgaccgtatgttttggaccccttaactcgggataccgataaacgaaaattaatagggtgttggatgttttaaatgtgtgcgggaatgtcattatattggctagaatcaaaccttatttagacttgttttgcacttttgtacactttagtaatttttagttttaatcataagggagttaaaggcgaacacaactggtatttttttttttttttttttttttttgagacagggtctcgctcggtcacccaggctggagtgtaatgctgcgatctcggctcactgcaacgtccgcctcccgggttcaagagattctcctgcctcagcctcccgaatagctgggcgtgccaccacgcccggctgatttttgtatttttagtagagacggggtttcaccatgttggccaggttggtctcgaactcctgacctcaaatgatccgcccgccttggcctcccagaatgctgggattacaggcgtgagccaccgcgccaggccgacaactggtatcttaaggcttagggcctctggtagaagtgagctccacctcccttcctgtgtagaaggtaaatgcattcattcattcagtgaatcgagcatgcatgaaatcgtttgcgcacacccagaagcccacctgcgagccacaggagcagccattccaggaagccaagctataatgggagacgcaaggaatggaggcggaactcctgtttttaagtcctagctccaacactagccttgtcagcctgtaattctgaattactgggcgcctctgaggcttcttgtctcatctgcaaatcaggaacaacggcatagagtggtgaatgcatcaagtgggatgatgtctgcaagtacgcaacccgcttacacaaagaattatctttccataaccttccctggacccctagggccagcagggaatcatagcctccctttgtttctagagcccggaaatcactgggttttccctctgtctggagcagagctgggtgcgaatttgaccaacgggtggcaggaacagccggagcaggatattaaggagcgggcgagcttgccaagcatgcgcagtagcggcgggttggtttgagaagccgccagggagccagcgcggcgacctagctggctggggcaggggaggggcccgccttatatgggagctgcgtggggacaaactgttcgggcccaacgcgcgggtctgagagacagccacgcctgctccgggtcactccggccacctggggggcgtcggcgcgcagactctggccagttcagtattcaaactcttcaggagtgctaacttactcatgacagcgattttctgtatcggggtttcattggtcggtggtttagaaggttttgctcattcattcgttaatgtaattccaacaacctacacgtgtttataagccccctttccatccacgactttgctgtctgacacaaaacggaccatcgcagcccggcagacgctttagacaacaaacagcatgcctggagcttttcaataggaagcagtaaggcttgatcatcacagacgatacggaacgggcactttcttagcagaaaatatttctattggggcgtgaaggaagtttctgaaagggaagattattataagataaggggtttgctcatctcagactttagtgtgcctgctttaaagtgttttgcaaacttgaatgtttaaaggaatcacctggcggtcttgtgaaactgcagcttctaatgggcaagtcagaggggaagcctgagacatggcatttccagcacgttcggggagtgaagatgctgtcggctgccaccctccctgcaaggagccaggggatagatgacctctacgcaaactgtgagagcttaaaataactgatagtgaaaaacagttacagaagctctaggccgggcacggtggctaatgcctgtaatcccagcactttgggaggccgaggaggatggattgccagaactcaggagtttgagaccagcctgggcaacacggtaaaaccctgtctctacgacaaaataaaacaaacaaaaataaaagccacgcatggtggcgtgtgcttgtagtcccagctactcaggaggctcaggtgggacaatcgcttgagcatggaaggaggaggttgcagtgagccaagatcgcaccactgtactccaacctgagtgacagagtgagacccaatctcaaaaaaaaaaaaaagcagtaaatccagggcccaaaaggtcagtaagaattcagggatccaaatcagttatgtactgatgcataaaaataatggccaaaaatgtggaggcttaaaacaaaaaccggttattatttctctcaattctttgggttgctggtgtcacccgggctttgtggctgggctctaggctcacctggggtgaggaaaagttggtgcattttgctttttcatcctcaaaaagtttagaccaggttccagatttcttgcggcggcgagacacctcgccaggagagcaccgcactatgcacaagcctttgctggacttccattgaccaaaggcagtcacatggtcacgcccaggcaatgtgggagggccccgcaaaggaggggtgggtactcaagagagccactaaataacaaacctaccttaagatcacatttatttctaacattttaatagttatagttcagtataattgattttcctggtaatcccatttattttattttatgcattttaaaatgttattctgaaaatgttactctcaccaaacaaccaaaagggtccacggcataaaaaaggtttaagaatctatgattttaaaattcaattggatggataaaagacatttttatttttattgtgtatatatacatatatatgtgtgtatatatatatatatatatatatatatatatatttttttttttttttttttttttttttttttttgagacagagttttgctcttgttgcccaggctggagtgcagtggcgcgatctcggctcactgcaacctccaccttccggtttcaagcgattctcctgcctcagcctcctgagtagctgggattacaggtgcccaccaccaagcccggctaatttttgtatttttagtagagatggggggtttcaccatgttggacaggctgatctcgaactcctgacctcgtgatccacccacctctgcctcccaaggtgctgggattacaggcgtgagccaccaagcccggccgacatttttattttctaagaaggttgaattgtgatgggaaggagaagagaaaattctgaaatctgggttaaaacccaaatggtctcaagatgcatatgtgcatggcgggactgtggggtgggggatgtggttgtttagtttgttttgatgtagtttattttggtcttcatttattattgaaatttttttctgatgtttagcaatctcttttttaaaacgttttttcaaatctttttttaatctctattttgaaaacttttttaatggacgaaaacttttgagtgacttaagctctctgagtcttagcttcttcatttccacgcaaaatagcactgtaatagaatgttcactccaccgcaaaatatttgaatcatcagggaatactgttatcagaagaaaaatactgtatttctcatgagctgtgctttttcttcatcctagcctctgaggaataaaattgatttactttcttacaaacatgacttttaaaaaatcttgatgaacatcagactggcacgcttaaattgggacgaaggatataactgacacctcataaacccatcgatttccctatgtgctagaagcactcaccagaagcattatatcacatgatacacttagtgtctcctacaggagtgccttacaccaagggacttaagttgaatttaagagctatgtggtgagccaatgagaaaaacaagtgttttcctggttttcaaataaatgtataataaatagtagtaccagagacaggaatcacagataccaagtccaaacccagcaccaatttttttttttttttttttttttttgatacagagtcttgttctgtcccccacgctggagtccagtggcgctattttggctcactgcaacctccacctcccgggttcaagtgattctcctgcctcagcctcccaagctgctgagattacaggtgcctgccaccacacctggctaatttttgtatttttaatagagacaggatttcaccatgttggccaggctggtctcaaactcctggcctgaagtgattcacctgctttggcctcccaaagtgctggggttacaggtgtgagccactgcgtctggcctacgattttcattttctaagtcacaaaatttaaagtatatttagaatcttctaaaatactaaacattaaaagcaggaataatttgaaaaagtatactttggggctagagagaaaatctgagctccaaaatcacagtaaagataattgcaaaaatcgtactaagtaattttagtaaagctttaggcaggtaaccatgaatgcctgctttcttttatagcaaaagtgaataaagaaatcacattagattcaatttaatagacgctatcaccctaaatcatagtcattttatatactaagataaaaatgattgttttcaattgcatataactgtatgcaaccatatatataaaactatgtggtcataaatagttcagaactgatagactgtagagtctgtggcctcattttaacttcgaaagagtgagaaaccatgtttatttaaagtgattgggaaaagtttcatggatgaattagttttggagatcggtcttgcaggagggacagatttgaacccagaaaatggtgaggaggtgacttctaaagcagaggaaattccttgaacaaatgtttagtgttggaaaagcgagtcctgcttctggaatagtgagaaagcctctttacctgaagcacagtgtaaagtttaaaaatagttgtaaatgcttctcttccctggactcataccttgcgatgtcattttgcagctcccctcaatgggaagtagaatctctttctccacctcttcaatatggctggccctggaacttcccttggcacacagaatgcagcagaattggcttcatgttgtttctaagccttggcctcagaggccttgcatgcttcctaaccctggctctaggaaacttgctgctgtcatgtaagcaagcccaggctaacctactgaatgttggtgtgtcccagtcaaatccagcactgcaaccaatagccaggcagccaccagacatgtgagtggggccacctcacaccagccaacctccaccaagtcatcagatgtatgagtgagaacagcccagaacaactgagcccgtccagaccagcggaacaaccaagctgaccagtagacttaggagcagtaaacagatgattgttatggaagccattctgtttagggtgtgtgtgttattgcttgcatccaaatacatcctatctcatctaatgagaaaaggccctgctcaagggcttttgcagctgtagttgggcgccggaagtgtctttgtggtcatttcttactccatacacggggagatcaaggctcagaccaggtagtgtgactgtggacaacactttccttacccctctgtgacacttaaatcaatgaagcagattcacagaagcatgcatgctcactgaacacagtatttgcattcctacctccaaacctttgctccacccatgcatccagtaagaatgcctacttccctcctctcctccatcgagttctttctttgagttctaccttccctagtcttcctccactgcaccaacccacggtgatccctgtctcttccaaatgctttgtaacatggtaggcatcactcacttgtgactcattggaccattttaaaacttggttttctgtgtctcttttccaacaaaattacaaattctttgagggtaaaagtcaggcctaatagttctctgtactcctagtagtgccagtgtggtaaaaatttaacttgacaattagcaaaaccaataaattccttacactattctgttcctgtaggtaatcagtatatgaatatggattcctatgtgatgattttctggtctattttgtcccttttttttttttgttactttaaccaggccataacataaaggttatgccatttgttactgtcaagcttaattaagcccattataattcgttaacccctgtgcttgctttgtaattaacattgattaacacaaacaagtacaaaataggccatcagcactttccagaagtgctgattacaattacattggtaattcaatacggtatagaagatggcaggatagtaacttgcactctgtttacataaggagacaaatgctaccatgcaaaactaagccaagaaacaaaatactttcctcatccaactcactgattaaacccttaccctgttaactcaccctatgactgtgtaaacctccagtaagattattgaaggcacagctccaagtaacttgcttaattgcattcctgggacaaaagagggaagcgcttcaaagctgacagacagatggtagagtgtccagtcacagcaaagcaggccccgaggctcatgacagacaactccagggctgagatctcatttgtagctctgggataaagtccagggtttgatggcagcaggctgaagtgtaaagatgctcaacaatgcgcaccccagagacactgaatctgaaaaagcttagagtgaataaaaatctggaaatgaactctgtctgtctattcaccattccccccataaaaaaattcctatattccggatggtgttcaagttccctttccacaggacctcagcagtcagggaggtgctcctgcaatctatgtgaaggagatttcaccatgcccacatgggaatacagtagattgccagtagggatgccacacctttgcatttcctcgtatttccaggaacaaagctggggtgcctaggagctgcagcagtttttcttctgtgtaaaataagcaagcaggactctgccccactgcactccagggaaggattaagagaattgatatcatccaaatcaattggccctgtgcagatgacttgataatgaggccattgagtttttatggttcactattattgctacaaaaattatgctgcagaaatcattcaaatgctcaaaaaggagcattagtacgaaactgggtgttccaaagttgttgctgagaggtgtgtaatgttcctgaagatccccaaggcactaagacttctctgtacatgaatgactcatagagaagaaatacaccagatgaaaatatatggagaagtttgccgaatgtcatataacttgtaagtattagagccgaggtctgaaccctgatatctgtgtccttatagctcaggccttttccttcagcccctccttctcagcagagatgtgttggagaaatcactagaaatggaagagcagctgtcagaagcagaattgaatgaagtgataggggaaaaacatacatgttgatacaaatggtcagccttaagcaagactgtgacattgatgcagcacagggaagcctcaaaattgggacttagcccaggagggttcttggcttcacccaggaaagaattcaagggtgagctggtggtgttagaatgcaactattactgaagtggcagtgtacggcagtagcagaggcactgcttgcggagcagggataccccagaggcactgtgcccagagtagcagctcagaggcagttctgcactcatatttatatccacttttaattatatgcaaattaaggggtggtttatgcagaaatgtctaggaaagtgtggtaacttctgggttgttgggttgttgccatggaaaggggtgataacttctggatgttgccatggcacactgatgggtgtgccttatggaaagctggtcctcaatttggtccagtgtcccagccccacactggagttgagtcctgccttctacctcaactttggtgacatttgtctttggtggccatagcctttctttctgccattatcaagcaccatacccaaggtctcatatccatcccaacagggttgtagacagtcatttgatccttttcctcagcatcctattttctctccctcatacacacacacacacacacacacacacacacactctctctctctctctctctctctctctctctctctctgttgttgctagtataaggtacaaccagactttttttatcatttattttttaaaataagatgtgaaatacattcaatggtgcatataaagtgtacaaatattaaatgttcaactggatgaattatttcatatgtatatacccatgtaaccaccacagattcagaatgtttctaccttcctagaaagctccctggaagtacaggctttttattttaaagtcaggtgtattgggatatcagtttcatatagttatattcagagttcttagtgtacagttttatgagttttaacaaatacatacatttgtgtagctaccaatatagtcaaaatatagaacagtatcatcaccccagaaatgtccctgcacccctttgtagtaaatctctcctagcccctgccaaccactaatctgctttctgttcctacagtttgtcttttataggatgtcatataaatggaatcatatattttgtgtctgacttctttcacttagtataatacatttgagattcatccatgtttcaatagttccttttattactgagtagtatttaatttaccgcggtctgtatgtccattcacaagttaaaggacatttgggtgtttccaacttttgacaattatgaaaaaagccactacaaacattcacatatagggttttgtttgaacctaagttttcatttcttctgggcaaaaaccaaggaaatcaaatttcttggtctattccaagtacatgtttaactcagaaaaaaaaaaaaaagcaaaaacattccctggagtgggtataccattttgcatttacaccagcaatgtacaagaatcttccttctccatattctcaccagcagttgggattgccaattttttaaagtcattttaccaggtgtgcacagatttttgaagctgcataacatgttcatagattttattgccatcttcagagaagacttaagatcagtcttaaacatctatttatataagagcaacttggctcatactaattaggcagttcatattaacattcctaactagagttacttttacttattcagtcaaattgattagttgtttatatcttaagcagtatctatgccaatttccctaacacacttaaaggcaaaacttctgattcacacctgctgctgtcctacaaggtatgcctgaaagttatggctcctcacttctttttggcacctctaaaaccctcaacaaccttcccctaatcacccttgtttaggtgtgttttctgtaccaagaaaatgaaacatccctccagcttctacgttcaaaaatacatctatcatggaaatccattggggtgtccccataaaaatacgtgtatgtacacacacacacacacacacacacacacacacacacacacacacacatataaaacactgctaggctggagaagaaaaaaaatgcttcatttcagtaaacaaattaccactcagtgacttgctagaaaattcgaccactttcctactcagtcctcactatgcacatgaccacacactgcaattctctagaagtaaccactgccgatttttctgtctcagtcagaagcatacatagtcagaagcatacatagtcagaacctggtcttctcagatttgtcatacaaattcctcttggcctgttgctactttctggatttcattgctaatgccttattcatttgcatcagcctctctcatctgctggtgccaataggatgctatctccaattagactgtaatacatgtgctacttcctaaaattacttatgtccctccttccctgcacccaccccaccagctatttctgtctgtatcattcccaaacaggtgaacatactggacatctcagctgcatattttaattttttaaactttattatttactttaaataatacatgcaaaaggacaaaaaggtacaaaaaagtcctagagctagcagtctctctcccattcccttccctagctcttcagttctcttgctcagaggcaactcctgttaccagtgtcttgtgccattccagaaagagagattttatctacttacagacatatcatcttgatatttttattctttgcacagatggtaacaagcaataacaaccttttagaaacttgtttcacataaaatcagtattttgtaaagcatttcatttcactatatctgggtattctacatgtatacctcaatagatttgactcattctttttaagagttgtgtaatattcaatgttgtgtacataacatgatttatcaaaaactttcaagtatctaaagtaaagatttagtggcttaaagaagatagaagttcagactgggcacagtggctcatgcctataatcccagcactttgggaggcaagatcacttgatgttaggagtttgagaccagcctggccaacatgatgaaaccctatctctattaaaaatacaaaaattagccagggatggtggcgcggacttgtaatcccagctactcaggaagctgaggcagggcaatgcttgaacccgagaggtggaggttgcagagagccaggatcgcgccgccactgcactccagcctgggcgacagtgtgagactccatctcaagaaaaaaaaaaaaaggaaaaaaaaagaagatagaagtttattttgtgtacaaaatgagcagagttggggtaactcaggactgctgtaggcagctatagtctccaaaactgaagctctttctgtctcattgttgttctgttcttggtgtatggctgtcttctcgcattggaaaatggctgcttaagctccgggcttcacttctacatttcagccaggggaaaaccaacatgttccctcatgagaaagacacctcccaactttcagttatatctcattttacaaaacacacaagggaggatagaaaatgtagtcataattcagggaacctattacaaatttgggactctattaagaaggaagaaagggagaatgaatattggggtataacagttagtttctgcccagaattgttgcctatcttttgttcttacctaaagtgctgaagtaggttttctttgagtgcaacatttctttttttctttttcttttctttcttttttgtttttttgagacggagtctcgctctgtcatccaggctggagtgcagtggcgtgatctcagctgactgcaacctccgcctcctaggttcaagcaattctcctgccttggcctcctgaggagctgagaccacaggtgcaggccacagatgtgggccaccatgcccagctaattttttgtatttttggtagcaacggggtttcaccatgttggccaggctggtctcgaactcctgatgtaagtgatctgcctgccttggcctcccaaagtgctaggattacaggtgtgagccaatgcacctggccttgagtgcaacatttcacactgtgtggggagtccatagaatttctgggttacagggtatgtgccttttaattttcatggatgttattaccaagtgccatttattgacaaggtaccagttcacatccttaccaacgttataagaaagtgcctgtttccccacgccctcagtagtcctgaattgtagtcacactttttttatctttaccaatatgagggttaaaatgtggtatcccaaatggtgttaatgggactgacttaataggactccctcttactttttagtgaagttgtcaaatgtctaggaaccatttgtatttccttatctctgaactgttttcatcacttgcccatttgttcactggattactttcttgtaactctgtagaaataatttataaatctggaaaagtagcattttctgtggcatttgttataatttttcccacagttttggctgttttttgtgttcttgtttccagatttctgttgttcaaagaagtaaactgctgggcacagtggctcacgcctgcaatcctaccactttgggaggctgaggcaagcagatcacttgagatcagaagtttgaaaccagcctggccaacatgatgaaaccccatctctactaaaatataaaaattagcctcgcatggtgacacaagcctttaatcccagctactctggaggctgaggcacaaaaatcgcttgaacccaggaggcagagactccaataagctaagatggcgccactgcaccccagcctgtgagacagagcaagagtctatctcaaaaatagataaataaataaataaataaataaacctttattttcttgtttcataaataaagctgactgagttggttggtctttagtgatcagtcaaaaagaccaaatcccacatccttattcaactcctccagcccttcctttgcttcaacctcggctggggaagcaaccaccaatgcagccggatcaacaaagaagaccttgaccttctcatggcgggggaaggtgaactcagtctccatagacaaagccaggaccttcttgtacccactgatgatagacaaggaactgacatcacaggtggatacccagtcggcatgcacatggtggcaacatggcagacaccctccaggaagcgagagtgcagtttcctctgtaatatcaagcactttgggtggtaggtgttgccgttggcaagcgcctgctgggtgatcagccaaaggagaaggtgaagggaagtatgtcagcaccttcagcagcatggcttcactggcggccactttgtctccagtcttaatcagctgcacgtcactcaggatttccatggtgatttctttgtgtagttgaatttatcccttttaaaaaattgcttgtgggttttgtgacatttttaggaaggcacttcccatctcaacattataaaataaattctcatgtggttttctttttgtggtaataataattatgaagaggctccaacctgatttattttaacatgacttctggttatcctggccccactgaatcatccatcttccctcagtgacttgatatcttggctgcatcttaaaaagaaggcagcagttcctttccacttaaaatgagtacatcttaattccactttctatttgatatatcttgtgtgtcacttatattattcattacactttagagttacatattgcagtgtatccagtttgccaatgaagatagctaagcactgagagattcaagcattcagactcacctggtcgcagcctagatactgaaccatgtaatgctaaacctcagggagttgttgggaaaggaattcaacctttggacattgttatgggccagattgtgctctccacccccgaaccctcattcatatgttgaagtcctaacctcagaatgtgactgtatttagagataatctttaaagatgtaatgaagttaaaatgaggttacaacagtgggtcttcacccagtatactggtgtcacaggaagaagaaattaggacacaggtgtgtaaaaagggaagaccatgtgaagacacaggcagaagacagctatctacaagccaaggagagaggtttgtagatcctgctgccacctaatgcctaatcttcaggaatctcacctccagtattgtgggcaaataaatttctgttgtttaaaccacccagtctgtggtactttgttatggcagcctagtaaattaatacagaggtacacagacctggccgaatcaattaaaggtctctggctgcaagcattagacatctagtcaggtccagtgtcttagtcctgtttgctgagtctgctatggagatctgcatgcagcaggtgcattgggagtgctcaccgcagcaatacctgtaggggagtaaaggaggctgggaaagggagaagttgaatgtgatgtaattgcagcagaggtctcaactgatcctaggaggagctctggagctgggatggcccttcagggttgtccagattgaggcaaggctggaccgttgtcccccagcagactttccctagaagagggtccaaacttgggcgaggaagctctgtgtggctgagggcaagtgctgagagagactcagcagtgagccatcagcagccaatgctgttggcagctggagaatgagtatctttgtcctggagtgggatctgggtagagcacgcctgcaaccaccactcccacctaagaagagggatagatatgtgggatgggatgggtatgtgggaaacttgcagcatggagggacatcttgaaggagtgggcctcaggacggacatggcccaatgcaacatggggagtgggaaggcaggaacagaatggacagtttctctagccaaaaaccactgaaatagatcaactccaatcatcattatcccgttcccttcaacattcagattccaggaaagagagagagtctacctagcctgactttggtcacctacttgccctttggacagaacggggcctggcactttgactgacagtccccagaaggctgcacaatgtgggggaagggtggttcccaaaagaccaattgagatgtcatcactagatgaaaggggatggacactgggcaggcgaaaacaactcatgtccattgggcaggccagctgcgttggaatctcagttttaggtgactttgggcaaatagtttgagctcataaaacttcaggtgcttcatatgtaaaatataaatagtactaccaacctcagaggatttttcaggcttaaataatatatcaatatctacctatatgtaagtgtgtacatatatatgtgtatatgtacacataaacaaattatgcatatattcacatatattcatgcacataatatgtagatgtatatgatccctataaattgagagcttccacttatttgatttatgtctatggctcctaggacttcattaaattttttctataatgttatccatatgcattttccattcccatcccttcttgagaacaggagaagcatttaatgtgtctttttgagtgtgctaattggctgggtgtgttggctcatgcctgtaatccctgcaatttaaggggctgatatgggaggatcacttaaggccaggagtttgagaccagcctgggtaacatagagagaactacctctaaacaaaatttaaaaattatccaggcatggtggcacacacctgtagtcccagctacttgggacactaaggcaggaggatagcttaagcccagaagatacacacttcagtgagctatgatcctgtcactgcactccagggtgacacagcaagactttgtctcaaaaaaaaaaagtgtgaattcccaaactctagttctggaatatcttagaaacaccgtttcgcttcatagagagaactgggaaagtgaaaagtttcacaattttatattcttcattattattattattattatgagacagagtctcattctgccacccaggctggagtgcagtggcacgatcttggctcactgcaacctctgcctcccaggttcaagtgattatccgtgcctcagcctcctgagtgtctgggattacaggcatgtgccaccacgctcagctaatttttgtattttagagatgtccaagtctcgaactcctgacctcaggcaatccgcctgcctcggcctcccaagtgctgggattacaggcatgagccactgcgcccggcctatattcctcattttggatgtgggggtgtatatgattttacatttagaaaaataaataaaataaataaaaataaaaatagtcaagagtggaatgaaaaaaccaaaaggagagtgtgccctgtatgtcatctgcctgctgggaggtgtgcaggcagaaccgtctcatggtttctcaacagcaggtggcgcgaggcaggggatagtccgggctgaggatgtcgaaggctaccccaaaaatgtcagaggccagtgaaagttccagaatggagtacgcagccccatttctttgtttgcttattttcgagagagatgtttatcatgatgctagggaaaacttgaatagagaagaggtggtaaggagagagtggggtggcattttcttccatacatctattttcaaaaaggatccgattccagcaacaaagtgtcgacttcactcctccacagccaccaagaagaacggcttctgtggacacttcccagcttgcaaatgtttcctctccgaggtcacacaaatagctgatacatccatttccctgaaataaatgccatcatggaggtcttcttgtagctgtcagaggttatgagcagtgttgatggagtggggtaatgacattgcaaagtgattgaaagggtttagcatgtgatttcctatttggttcagacaaaataaaaccattatctgtgcttcatcttttttaaagagattgtttcctgagctctttcatgcttgaagcctgttgcagcacccagggacaatattagcctgtcacaattatagatcagttcatcaccacagtcagcctccaatctccttgaactctttccagaggaaatgacttttctgggtctgtattatccccgggtatgtcgacttttgaaaaagatgttgctgcaatcattcatttaactgtggagagctgtctgacagcacagacccaggcacattggcgaatttgctggtagatgcctatgagcaaccaagacctccattagctcatgtgtcaagggaaagcagacacttggacatgtggatgcagtgggggcagcagcttgcttgaatgggttatagatagacttgatgttgaagggattaggggttccctagtgcctttcttatctgttactaaactatgcctgaatcagtgaactcacgtggccaggccacagtgagtgttcaggagggctgtcagtatcctctctcacacacttttactccctgctaatgcaggaagctatctcattaatgttctggctcgcaatcccacttcactcaacaacagcctgtcaccagacctattacctgattttcaggtgttagattgctagctctacaatgcaaagggatttccatcccagggactttctaagcatcaggctttaactcagcctccacacaagggatagaagaagatcccatggcccagaatgaaaataaatcattttcataggtgaatgcagcaaatgtatatagacatcaatttacctgttgatgctttttaaaaaaataaaaaatataaaatttacaaatctttgccattttgaagtgtaagtgcaatggcattaactacattcacattattgtacagcatcaccaccatccactccagaacattttttatcttcccaagctgaaaatcagtacccattaaacaacgactccccattttcacctccctggctatgtcgtccttgccaatgaccattccgctttctacctctatgaatttgactactctctataccttacacaagaggaatcatacagtatttgtctttttgcttatttcacttagcataatgtctaaaaagttcatccatgctgtagtgtatcagaactttattcttttttaagtctgaataatattccatttgtatatataccacattctgtttattcatttattggttggtggatatttatattgtttctattgtttgactgttgtgaataatgttgctatgaacatgggcatacaaacatctgttcaagtccctattttcaattcttttggaaggcaactacgttcaccactataccaccaacgctagggcttttttgggtatatacctagaagtgggactgctggatcatatggtatttctatgtttaatttttggaggaactacatactgttttccatagtgcctacaccattttacatccctttcaacaacgcacaagggttccaatttcttcacatcccatccaacattttttaaaggttattctaatgagtgtcccattagtgtttttaaatatgatcactctccatttatgaagttgcttcaaaataaaggaagagaaggagtatggaaagaaaatcaatgaggagtggtcactgaatacagaaccaagaattttgtgagatgtcagccaccaacatcagaatctcttttggatctgagaggatacatactccagtctttggtacttctaaaatttttcctatatattgtcaagctgcaacgagctgagaccattgtcatacttttattctattagctccacagaacaaaaacatatttattaataataatatcataaaaacagactgattctcatctagcagaaaatatttgaaatatctaaaactgacaagggttaatattttaaatataccaataactcctgcaaatcaacaaggaacataagaactccaatggaaaaataggtgaagaatatggataagcatttcacagatagcaaagacagaaatttatgaaaaaagtcctcaacttcattagaaattagataaataaaaattaaaacaaaacacacattgcacccctaataacagcaaagtttaaaacattaaaaaataaaaacaagttgaaaaagatgtggatagacaaagaacttccatgcactactgttggaatgtaaacttagacattctgaaaaacgaactgatgttgttttatgaaattaaatatgtttaagccaaaagaggcagaaattcctctcttgaatatcctagagaaattcttggataggtctgcaagaaaatatgaatgagaatcttcatcacagcattgtttgtgcccccaaggtgtgaagaaggacaacttactgtctatcacaatgcagcaagataaagaaaattggtgcatgcacaatagaatacgatgaagcattaaaagcaaccatttaaatgtatattcagcagcatgagagatatgataaagcaaaatgatttaaaaaatcaggaaacagactaatatatatagcatatcacctttaatatcatttatgtgcattaacagttcacaaagatatagaacagcaccaagtgtttttaaaggtacatgcatattagggatgtacatcagcacattagaatgggtgtctaggacagggagaggagaatagatatgagaattaggaatacaaagggaaaaacaaaaataaagcaaatgaggggccttgcagtggactgctgatatcagcatgatggtgataatgataatagaactgatgaacatggttaactcatgtttccttacccgaggtccaaacaaaaaataaaacaaagcaaaacaaagcaaagaaagttccagggatcaacaatcaatatcttagctgatcatttatctatctgtcttatatcataatatatacatttatatctatatccctcaacccagaacattccagcatagatagcaagcaattctacataataacaataaatgctttcattacacttaatagtgagagactgaatgttctcctcttaagatcagaaataagacaaatctgttctcaccacttttattcaatattgtactggaggttctagacagagcgatatggcaagacaaagaaatacagtgcagccagatggaaaagaagaattaagctatcactatttgaagaaggcataatcttatatatagaaaatcctaaagaatccactaaaaaaaatagtactaataaaagaattcagcaagattgcaggatacaagattaatgaaaaaaaaatcaattgtatttctatgcaccagcaaggaacaatccaaaaatgaatttaagaaaacaactctaggcagggtgcagtggctcacacctgcaatcccagcactttggaaggccaaggggggctgaccactttgagctcaggagtttgagaccaggctgggcaacatggtgaaaccctatctctactaaaaataaaagaattggccaggcattgatggttcacaactgtagtctcagctacttgggaggctgaggctggagaagtgcttgagcccgagaagcagaagttgcagtgagcttagatcttgctactgaactccagcctgggcaacagagtgaaaccctgtctcttgaaagaaaaaacaaaagaaaaagaaaaggaaaagaaaaaagagaagaggagaggagaggagaggaagaaagaggaaacaatcccatttacaccagcatcaaaaataatgaaatacttaggaataacgtaacatagtataaaagttatactcagatacaaaatattgttgagagaaattgaagaaggcacaaataaatggaaagacatctcactcatggatagaaacaaaaataattaatggaaatatagctgatacagtagaaagataagatggcaatattccccaaactgatctacagattcaacacaatcctgatcaaaattctagctggtttatttgtagaaatggccacactgatcctaggattcatatgaaaattcaaaggacccagaatagccaaaaaatcttgaaaaagaacaaaaaataggggattcacacttcacaatttcaaaacttactacaaagctacaataattcagtgtggtaccagcataaggatagccatatcaatccatggcatagaattgagagtccagaaaataaacccgtatatttatggttaattggtttttaacaagggtgccaagacagcttaatgggaaaaagaagagtcttttcaacaaatggtttcaggaaagcggattgtccacgtgcaaaagaatgaagctggactccctccttataccacatgcaaacatcaactcagaatgaatcatgtatgtacatgttagagctcaaaattagaaatttgttagaagaaaacaaacaagtaaatcattgttgccttaggttaggtaatagtattttgttgttgttgtttgttttttggtttttaagttatgacaccaaaagcgcaagtgacaaaagaaaacaaaaattgtattttaacaaaatttaaaacttctctgctttaaaagataccatcatgaaagtgaaaagacaacccacaaaatgggagaaaatattttcaaatatttgcaaattgtatgcttgttaagggaatcagacaacaagttcagaaataaaaagacataacccaatttaaatataggaaaagggtcgaaatagtcatttctctaagaagatatacaaacatccgacatgtacatgaaaatatactcaaccttactggtcattagggaaatgcaaattaaaaccacaatgagataccagtatacacctactaggatggctacaatcaaaaaaattcacaataacaagtattaacaagtatgtggaaaaattgaaacccacattaattgctggtgagaatgtaaaactgtccagctattttggaaaacagtttggcacctccctgaaatgttaaacagagaattaacgtatgacctggcaattctactgctaggtttaaattcaagagatatgaaagtatatgtctactcaaactcacatccatagcagtattattgaataatagccaaaaagtagaaacaacccaaatgtctgtaactgatgaaaggataaacaaaatataatataaccttgcaaaggaataatactcagcaataaaaagaaatgaagccaggtgcggtggctcaggtctgtaatcccagtgctttgggaggttgagatgggaggattgctggagtccaggagttcaaggctgcagtgagctgtgattgcaccactacactccagccttgatgacagagtgagactctgtctctttaaaaaaagtaaataaaaaaaaataaaaaaaaaatgaaggactaatatgatgattgaaccttgaaaacattttgctaagggaaagtagccagtcacaaaggatcacatattatatgattttatttgtatgtgctgaatagtcaaacctatacagatagaatgtagatcagatgttgccaggggcttgagagaagaggaaacatgagtgactgctaatggcaagagagatttttaggggatgataaaaaggttctaaaattacacagtaagtgaaggtggtacaattctgtgaatttataaaaactattgaattgtgtgtgatgaattgctaaatcgtacagtatattgattatatttcaataaacctgctcaaaaaatacaaattctgtttgtttgatgttgtttttaacatcactgtatgccttcttatgctgaaagtcagcattggagaggaagaaagcaaactaattcaatgcttttaaagaagcatgttaaatacctcactttaaatgatcaatcacttgggggcgaagtaacacacaaaataaatatggaaataagcgtttttctccttctgttgcacacagcatgaacacattgactactatggaaaagaaaaagagaagtccagccatgtttggctaaaatgtacagtgatatttaacagcaccaagaaaaatttcagagcattggatttgggcacatactgaaaagcccttcgaattaccttttgagatttgatacttgtactagtcacctcaaagaaagtgaggacataataagccagaagggaaataagaaaaggggctgtttcatatgtgactttgggaaggattatcccctggttggggatacccagcagcagaaaaccatcatcaggctactgcagatcaacttagctgcagtgtacctagaaagactggatccaggctgggtgtggtgactcatgtctgtaatctcggcgctttgggaagccaagatgggcggatcacctgaggtcaggagtttgagaacagcctggccaacatggtgaaaccctgtctctactaaaactacaaaaattagccaggtttcctgagttcccaggagctgtctggtggccctggtgatggcccctgaggctggagtccccatgggcagcccagcctggctctgttccctgtcttctcaccccacccccactcccttggtggcctgactcccacctcctggtggccccatctcccagttcctcataacatggtttttacttctgtggatttaataaaacttcaccagttcaaaaaaaaaattagccaggcatggtggcgcacgcctgtagtcccagctactcgggatgctgaggtggaagaattgctaggacctgggaggtggaggttttggtgagcagagattgttccattgcactccagcctaggcgacacagcaaggctttccctcaaaaaaaaaaaaaaaagactggatccattatccatggccgaccttggtcatcttcaacaagataataaaggaaacctttgttctaatcttggctcaaagaaagcgatctgttgtgtctcttgttgcatatgaaatttctcaagtccaaataattaccagtgtctttcatttacatgaggcatttccacggttaatgtccaacaaaaatctatgtggagtgccatatttatcagacttgataaatattgaaagtacttatacatttcataattaacaaactgacctttacagaaaaattaactttctagtggtgaatgtttgtaccacatattccaaattaaataaataagcacttcggaagatggaactgtgtattttattttttaatatatttatgttctcctaaccccatagaacctagaataaggtcaatctatatttacttaaaaagttggaaagaaatggtacaggaaggatcaggacaatagacttccaaaaacatagaaatgaaatgatattaatagaagacacacccaagggacatatcaccatgcttattgagatactgtggtccctggcagcctgaggctctttgcttagaagacaagcatttgtttataaagttcaacatggtaggtgagtgacattatttgtggaacaaaaaacttccaaatggtataatttagtattgctttataacatcacttgtcaaatttgttttcttcagcctgaagaatttctaatttaaatttgttggcatcttgttacatctgcctgagaagtctttgggctaatcacaaatttagacagagctgaattcttcaatctgtcttcttttgtggttttgtgatcctagaaggctctcgggggtaaagatccagaagtatcccagaatatcccaatagatacaaataaaataaactaaatgaaaaatgtcaaattagctggacgtgccggcaggcacctgtaatcccagttactcgggaggctgaggcaggagaattgcttgaacctaggaggcagacgttgcctgggtgaaacagtgagactctgtctcaaaaaaaaaagtatattttttatcatttaaaaactgtcaatcagaaaaacttcccatttccttttaaaatgtgagattggcctcactgtgtatattgtctaatttgtttgatcatcatgcagacaaccaagtcaaatactttaaggcaaagcaaaacagaaaatgttaaaagtcctttctgggaagcaaccaagcttgaatggaccctggatatatggcctagccactaccctatatgtatagtttcctagggttttcagttactcagaaaggcccacatgcttccgcactgcaatgcgcaaagctctctcatgcctctgccatctgctcctgaccctgcaccctgacccacaagcagatatgaggagaaagcatattagaaatcaaatcatgtctgttctgctcccaaaacagtgccaagataacaccaggagagaacgacatgtgagagaaatttgagcctaagatttatttgggccagattacctggctggtgaagatgggcagttcatcatttcaaattttattcaaaacaaatcaagaattgccattcaatattgatttcatttattctgcactgaatccacacttactgagagaactattccaggtgtagtccttgttttcatcttccagtttgtttgtggagatggggatggatgtaggaatgaacgatgtcaacatctggcacaggtgctaaagtaataggatactacattgggggttcaaagaatgaagatgctttcaactcaatcttcaacttcacgcctgtctactaaaggagtccccaggccgggcacagcggctcacgcctgtaatcctagcactttgggaggccgaggcaggcagatcacaaggtcaggaaatcgagaccagcctggccaacatggtgaaaccccatctctactaaaatacaaaaaattagctgggcacggtggtgcacgcctgtagtcccagctacttgggaggctgaggcaggggaattgcttgaacccggaaggcggaggttgcagtgagccgagatcacaccactgcattccagcctgggtgatagagtgagactctgtctcaaaaaaaaaaaaaaaaaaaaggactcccagtttggctgcaggtaagtaggtaagcagagtgctttgttcctaccacattaaggagtggcagatgggatggatggtcggcctatcttgctgaaaacatctcaagtacactgcagaagaaaaacacacactgggcttctgatttgtcaaacatgttccagggtttgtttgatgtggcaagaatatacattgtcagggtagggggatcccctgcgtgacacacagcctccaggattcaatttccattccagtaagcaccacttacaaaggtgaaagaagttttaggtttattccctaagtaatattgctaatgaccactgacagtgaacgtcaaatgtctcagactcagtaattgcagaaaaatggtaaaccaaactctgaggctctgctctcaagtcttaaggaagggcaaggaaactctggagggctccaaaaatgcagagatggagagcaggtacctgtgtgtctggtacccaggtgtatgtgcacctggaggggggtgcaggggccccctattgattgccctccatattcactttaatgaagagggagtttccatatcatggcagggctttcccaggataagcccctcagcctcacagtgaagagagatggtctactgtatcaagtatgattcattctattctttagggtttatttgttttgtatttttgagacagggtctcactctgtcacccaggctggagagcagtggtgcgatcttggctgactgcagcctccacttccagggttcaaggcatgcgccaccatgcccggctaatttttgtattttttgtagagacggggtttcaccatgttgaccaggctggtctcgaactcctgaccttgagtgatccgcccacattggcctcccaaagttatgggattgcaggcatgaggcactgcacccggcctaggtggttggttttgtttgtttttagaaaaacacagtattttaaaaaatctgttggaattgtactatagttatgcaagattttaacattggcagaggaggagtgaaggatacatagagcttccctgcacatttctttgcaacttcctctgaatctataattagttcaaagcaaaaacttgaaaaatatctgttggtacattaggtataaagtaaataaataaataaataataaaacaatctccctttatttaaaagagccagatgcgtatttgtctggggtgtgtgttaccttagataatgttttgatacaactctattatataacatcttctgctcatttatacaattatgtatttgcttactgaatttcttcattcactgaatttttaaaaaatgtttctttcagagacaggtcttgctctgttactcaggctgaattcggactcctgtgctcattctatcctcctgcttcatcctctcaaatagcttggactacaggtgagcactactgtgcccagctcatttactgaatattaattgagcacctattacatgtcagagcattactgtaggtgctgggcacggattttgtcctcatgattcttatagtttaatagggaagacagctatttttttaaatctcgaaatgcataattgtcattgtgacgaatactttgaaagagagttgtgtggtggaacaatcagagtttcctctggcatttttataagaactaaatgagatagataccctatgtgaaatgcttttaaaccattaagttctttacaaatattggtggtcattaatatttggcgcaaacatggaagtttgttttcttttaaattcagtctttccaaaagggtcccaattactagcagtttttactagtctcatccctctctctggctggacatcattctcctaccttctgccctgggaaaaccagatgccacctgcccacacacccaggcacatgcagtctccacatccacacaccctgaaacatgcattacacagaagtataacttggcgcaggctcctgaaaagttggccccagattctctgagcagctggcttccctcacagattatttcaggacagtcaggaagcctgattctttggagggcctgctagcatggcattggggatgatccaaatgcttttgaggaattgccaagttcaattttcaaagagcagtgcatctactgacaccagcgtctattcctaaaggagaaacttgacctacttttctgtcccagaaatcccttggggtcttcagcttggccagagcctctcacattttaagcacagtaatggttctcaacacctatgctcagaggcatgaggtagacatctggattgtcatgcagggacccagattttgaggaatggggggtgggaacgtcagtggagaaagacacatctgacagagaacccttggagccaagtcattagacaagagccataagagtgaagaaccttggggttcagtaggatgttttggagatgcaaacaactcaccttgtgtgcaacttcatgttgggggtgggagaagctgaagatgaacttaaaataaggccaaaaatggcgatgagagaacaggagtgaaatagaagatggagtgcaggtggaggatgataaatttggtactactgagcttgaagtgctggacaccatcagtgtccagaatacagttggcaaatcatgcctggaaccttgagacagggttgagatgagatgccatgtgaacaaaagaggccattgaagtgataggagcagtcaagctagttggtgcagtaagtttccagctctactgtttctcccaagcccagctcttgtgttgcagattgatccattgccacatccttgctccctgcatctccatccagttcctgtacattgctggcttccataacatctatttccatactctgtttgatgcagagacagagatacaacctgccatggctgacttttaataaggtattgaactcccctagcctcagtttctcatctggaaatggggataatagcagctcctgcctcacaatgctgttggctgcctccaagtctttaacacggtattagttagtgctcaacaaatgttactattattaatagttggaaaggaggagagatggaatatgcataatgaaaaagtgattggccaggcatggtggctcatgccagtgattccagcaccttgggagactaaggcaggtggattgcttgagctcaggagttcgagaccagcttgggcaaaatgacaaaaccctacaaaataataataataataataaagatacaaaaattagcctggcatggtggtatccacctgtagtcctagctacttaggaggctgacgcgggaggacagcttgagccccggaggtagaggttatggtaaacccagattgcaccactgcactccagcctgagcagccagaccctgtctcaaaaaagaaaaagtgattggctacttttattccaatgttacataaaagtagcagtttggtctagattgttaactgttgaccagtaaaattcatgatgccacaaatacaaaagcacaagtacggcatttgcatatatccatatatgtatgtagtcacacaagtgtgtgaacagacacatgcatatacacatatgtattatatatacatatatatgcctcagttcttcagaaaaacatcactctcactgtttttctttagggcacttgctataatgacaattttgcctctttgtgtgtgattatttgtgatgatttgtctttcactagattgtcagcactaccatggcatgggaaatgtgtgtagttatgcagcaccatagctgctgcatagcacacagtaggagtgcaatgacagcttgatggatggagagagagggtggtaatgagtagagaatggcatcggaacattagctgcaaataaagccttatctagacaaatattatttcatcatcaaataatttgagggaaaagtgggtttgtttatttacctgattccctgactattaaaatgagtgatgaataaatcagaatggacttctaaattataactatgtgctgtaaaatctataaacaaaaacaaaaaacacaataatttccctcagccctgtttctttctaatttaatgtgagctaattctttgagagggggtgttaaaatcaaccaactcagcctgtaagtatttactgagtgtcaattatgcgtatgacattacactagcactgagtgaaactggcaagacatgtgaccccaaaggagctataatgttctaagaggtacagacatattttgaaaattagcatttgcaataactgacatttattgaattccatatttcaaacactgttttaagtacttttcaaagctgagctctattaaacctcacaactctctgaagtaggcataaattattaccgttttatattgaagaaattaaggcacagagacactaagtttctagcccaagatcacacagctagtcagagggccagctctcaggagcctatgctgtttaccaccactcttcattctctctcagaagagcagctgaaggtgggagctggaggcttgttcaaaaattaagtatacaagctgggcatggtagcttatgcctgtaatcccagcacattgggaggccagggcaggaggatcgcttgaggccaggagtttgagaatagattggggaaaatagagagacttcctttatacaaaaaaaaaaaaattagcagactgtagtggcaatgcctgtagtcacagctcctagggatgctgagactggaggatcacttgaggccagaagttctagaccagcctgggcaacacaatgagactctctctacaaaacaaaacaaaaaaagcataaagaattcagctcaccttttttgtagtttttttttttttagtagaaattaaaatgatctacttttttttttttttaaagaaattggccagccttcttggaggctctgaaagttagtcatttcagggaatttgaacatacaacggaacattggcccaagaatattttaaaaattgtttctcattatatcaataataatcagctgcaaactgatcccttacaacgtatatgggtttcattttctggcactgagggtgaccatatcccaatgagtcattctaaaactaaagaataacataattgacatagccaaagaattaaatgtctcattattgactgaggtatagacgtctccaaaatcagcttggaagtctacaaagagttcttgaccatttacacagttatttggagtttccgtgtaactgtttattagctaggatacaaaataaaaggcatttatttgcaacttattgtgaaatatcggtgtgccatcttacctttctcagcatacctgaagttctactatttcttcctctggaatcatcaaatataatttgaagtaacctcaccaagccactctaatatatgttattttttcaggagaaagtgatcaagtggtttccttgatattttaaccatactgttccctctgcatgaaaggtctttccttactttatctggcaacctccttctcattttagcaaatgcttgtgcaattattactttaccaaaaaaaattacatttcctcctttctgatctaactctttctgatcgcttgtgtcagttagggattgattttggtgacagacaccaccaaatataatagacatgtattttactgtcttataacttgacattcaaaaggcagggtaggcatgttggctccacaatgtctcccaggacctggtattctttaatttttctgctccctcatccttaatgtgtagctttccttctcaggattgcctcatggtctcaagatggctactggagctccaactctatcatctgcattccaggcagggagaataaagaagaggagaaggggaaagagacactttctagaagagtatactatcctatgaagattctttaaagtttataaaataactttcccaaaggctcatccaatgacttctcctttcttctcattggacacacatcttttatggaggccaggaaaagtagattttaaaaaatctgagttaactgataacatagggattctgttactaggaaggtaaaaatggaacgtagttagacaactagcaagctctgctttctcccaaactgtggtggtttcaaatatgtctacaaattcttggacacatccccattaagaggtggcatctgtgtgccacccttgaaatctggcctggccttagtgactattacaacaaatggaatacagagggatgacactgccagacttccgaggttaggtcacaaaaggccatgcaacgtgcacgtgcttctactggaacactaactgtcttgatgtcctttctgggatgttctcttttgagactcagcttctatgttatgagaagctcaggccacattgaaaggctatgtgtaggttgtcagtcccaggtgaactcagtttttgagtcatcccagcccaggtgcttgacatgtcagtgaaggagcctccagatgactccagtccccagccatgacatcagcctcagccttagtgacttttgtgatgttgagaaccagagataagccattctcactgcacactgcctgaatccccaacccacagaatctgtgagtttaacacaatggctgttttaagcaacaaagatttgttatgaagtgattgtaactggaacacatccatcctccagaaaagaggcaattgcttccaaatgtttccatcccactctaggtcagcctctacactttctgcaatgtctattacctaggaaatgatggctcttgataaatgtttcttcaatgaatgggctacatacaggactcacattttgttctgcttacttgttaacatgcccatcttgcagtctctgctagactgcaaatgcaaaggcaggaactatctctaatggcacatagtgggctctcaataaaatcgagaagttgagctgaatttacaatggatgacaaggatggatttagcaactcactgtaacgctgactgcaaaaaagttacattttaattttagaggaaagcaaataggttgttcaagtaatttaaacccatggggaaaagcaaattgggacaaaggcatgccaatcacaattcagtaacctacacaacctggccttatagcccagaccatatcatcttctggacctgaccaataggccctgcctgggcacacttactcttggaggtgtctggccctggagaagagggaaagatgtgtttggtggcctgggctcactttcctttggccttcaagtcaacaagttctccagtaagtacaaccaagagatgctgggtacacatcacgtactcaagactgtggcttggtgtctgtggttatagaagaatgctggagcacaacaacgtggcgcatggcctctcaatggtccaggtccagtgctgctgggcatacaattttcaatgcctgaaatccatgacatgtttatcagaaagagtatgctagtttatgctgcaataacaaacatcccccaaatatcagaggcttaattcaacaaaatttatttcttacttccctacaggcctagcatagatcagtatagggattgtgctctttttggctactcagagatccagactgagggaggttccatatactggttctcaaagcttccaccagaagtgactcatgtcatttccatttccattatattggccaaagtgggtcacatggtcaccctgatttcactgggatggagaaattcagcctaccatgtggctagaagaagttggaacatggcaagtgaatgaatggctgttcaaggtgtgtgcatgcctctgcccctgatgaaatgcaaatattcttggaacaaggagtccacattatgcatcaactgccattaataacctcatgtggttattataccctgtttttcttgagaaaagtcttgatgtgatcagaaaagatatccgtggagaccagaagagacagtaagcgactcagctccagaaaacagaaagatcaatttaggaggggagagacaatggcttttcacactgtctagtcctaattctgtccctaagcagctagaagttcttggacacaaccttcaacttctcagggccttggctcctagtaacgttctgaggctactggaggatattattactaagccagaggtcacttcaccaacatattaaataatcacactctcacagacaaggaaactcacacatggacagacagagaaagagagacaggaagaggagagaaagaatataacaaagcgctagcatgaatgcaagtagagagaaagtcaatgttttaaaggcaacgagacgttgtcttctgagtctccccagctcaccactccctacaaggctctcagtcctacgggatttacattggggtctttccaaatggcaggctaggtctcaaaacatttccagtgtcaatttgagaaagaacaaatattcataccagatagagagggaaagaacctgctctcttttacatctagagctgcccttgaaaatgtgagtttattaacctcgaaagaggccggggaaagtagaaagggctctgaggacaaagttcagccaagagagacgttgggggcaggttttattggtcatataacctcttcctgcgggaattttatgaggcgctgtcaggcagcagaagccgcctgactgctgggtatcggaggggctaggtttgaaagcatattttctgtagggtcttgatgtatttttaagaaggcaggcaggaattatgtattcctcctggtataggatttctcatttttcttccagcagaagtgggaatggattgctctgagatttgcaagcttcctgtgcattcgggagggtggcagttagaatgacagtaatgacttaggtctcctctgagggtggttccttcattactgggcccctccactgctccccttccccctctgttagtcacagctgtacaccctgcagctagcctgtctctttctgggacagcctgtcagccacacctgctactgccccaaatggggcactagagactgtggggcaaaccctacaggattcctttctccttttaccctggcagcacatgtgcatacacacatcttgtacacgcagacatacaagagaacttgcatttcaaagaacactgtgagcaatttgagaaatgaatagtgaatcctgaaaagggaggtgaggaaatggggagagccagccccactcacttctatttggggaagggcaaggagccaaggttgttggttaatcacatgtaccaggacagcaaagcaaagcaaaggactgattttcataatctacacacaagactcaaatctttaccacatttccttaaaaaacaaatctgaaagtggccatctgccactctacgcagcattgtggaaagaatcccacaaatgtcacattgagcaaaagacagcagacacaaatgagtactatatacacttatttatgttaaaaaaaaaaagggagggtgcaaaattcatgagtggctagaaaaagtcatgagggccttctgtgggctggtcgtgtcctggttcttgatctgggtgccagttatgtgaaagtattaaatttgtgaaaatgcatcccttttctgcataaaactacaacaaaaatttgatcatgcctctcccctgcttcaaggagttccttggctggccattgtctgtaatgacaaatgtcactcctccatgaaaccttccttgacctccttcatctttccctacttagttataacacaggctgattacctggcaatgtttgatccgtgtatttcctcattaaaacatgaatatctgtagggcagtgcctgggtcttactcatcttttgggcccaggtacctggtacagtacgtggcgtatagaagacaccctatagatgcttgataaataatagataattgaatgaatgatgcgcaactccatagtccgttcttgttagagccccagatcatcttggcgctagcagcatgggtcacgggcattccaggactcatggtgcttttggaaagggaagtgtgttaggaggcagcttcctgtgttcacagctcccacagcttgacccaccactcacccctggactcagtctgacctctgaccccaccactccactaaaagatctttagcttaggtctataacgactttctaaatgtcaaatccagcagacttttcttgagcgttattatgcgtgagttctttgagacatctgatattgttgagcactcattttcttaaaactttgtcctttgctggcttctcagacaatactctcttattcctcctccctgaaagtttctccccagacttgtctactggctccttgttctctgctcccatgcactcaggccggaggccatcgtctcttctctcttctcactctcctacacccacctcccatatgctgaagtctcccagctctgggatgctgagatccaatgtcttactgaggagctccttgtggttgccccacagatgtcccaagacacaatatctgaccctgtacttctcttttttctcttcctaacctactccttttcttttctgaagacactagttttgggaaacagtgtcaccatccacctcttcacccaagccgtaaacctggagccatcctagatgcttccccagccctcaccatcctaacaaatcagctccaagtcctgtagatgcttcctgcttgacatctcacctgcaggttgcctcttcctcactctcattccaattgccttgatgctggctcctgacatctgtaactccaagttttgcagtaatcttctagtctttccccatttctagtgttccacttttctagccatgttttattctgggtcagcaggatcttcctaaaatgcaaatcagatcatgtcacttctctgcctcaaattcttgcctacagattagttgcaaagtcctaacactgaccacaaaggccttacatgatctggcctggtctgtgatttcctctctagctttctctcccaccaccacccactttgccctcagcattcaagaacatattcttcttcttttaaaaatccaggatgtgctgggcacagtggctcacacctgtaatcccaatactttgggaggctgaggtgggtggatcacctgaggtcaggagttcgagaccagcctgaccaataaggtgaaactttgtctctactaaaaatacaaaaattagctggacatggtggcgtgcgcctgtagtcccagctacttgggaggctgagacaggagaatcacttgaaccgagaggcggaggttgcagagtgccaagatcacgccactgcactccagcctgggagacagagtgagactccatctcaaaaaacaaaacaaaacaaaacaaaaaaatccaggatgtttggtgccgctgtgcctttgcccttcctccaagtattccacctgcctagaatgtcaccctgcaagccactcgccccaggcctgggttccctgcctaacccctgcctaccttatctttctagagacaactcaggctcacctcttcctggatgcttttctcaagcccctattcctgggtggacctggccatgcctcctctgaactccagtgtctctgtacacgcctctcccgcagcacagggaggagtttcatcttccccttctgatccttggtggccatgataatgtcttatttgtgcctttgtgtgtatagtgaccagcagaggggcacccagtcaaatgcctgtgaaatgttgttattgaatgaattacccagtaactttagttctcatggaggaaaagggaaacagaacagaatggcaaacccaaagtctgaaggagaaaacccacaaatactgcaatatgacctatgcaatggagaaccatttttttccctgctgcttggtaatggcctcttatttttcctttgggaaaccagcctcgcacccttgcatggagtattgctaggctctcaggagtgggtcaaccaaacctctggaaacttcaatgaagttttggtccttgtaagcaaggaccaaaaatggtttcttctgtatggaatctcaagactatgtgaattcctgtcctttctgaaacaggtcagattttttttctattttgtggacacttaaatccctctaataaattatatttctcccttccgtggtctgggatgtatttctctggcttgcacttaaaggacctttacagataaaactgtgaaagtcatcacaatcttgatttctgctcccagtcccgccccagctgctgccttcccagaagtcatccttcaggtgtggttctgtctcagtcagccccagtgacttgcctgcggctgacttctgtgaattcaggcttccattgtctacctggctatgactgtcatagggaagctgttagggcagcagaggtgctgatcatttagtgacaggtgcaatcgttactacttctttctagcatgggtgttgtctgacttggtgggagtgagcaggaagggaagatggtggtgttggggttggaactacagaatggatgaagtgagaggagggcagaggagtcacaaggaaggacaaagtagtcaaagtataaaaacatctcaactaccatttggggccaaggttgagtctcttatggattttgcttggaggacactttggccagctgtttttatgttaccagaagtgggaagattaatacatgggtattggtccagatggaaacagggcatatctggcttctgcatacttatcttccaaaagctcatttataaagcagttgtgtggaactcggtatgtgtgttctcatggaagcaaagtaataaagggtggccataaaagctcaagttaagccggatcacagccgggccactccacatgcggaggctccatctaccacggtgaggagagctggcctggagatagagctgatgctggacaagccgggcttagtgatggagggaggagactgaggcatcatttgagcccctgaatctgtctgtgcctgcagcacctcttacaaagttcctggtgatgcagtcccagcctcagtagactctcttgtccaaaatcttccttgcacaaccaccacaagcaccacaaactactcctctttccctctttagaatcccaatgtcacatattgcctgtggctctcaactcaaatcttaaaatggacagagttaagtaccttgcccttctcaatcagatgccaccagaaaggaaaaatgaatgaaatgcagtcaccatccttagctcaaagcctggtgagagggatagaacaaatacaactgattgatgaagcacagagaggaaaagcaacttggccaaagacacacggctcattatcatggggtttgagttcaaacccagacagtctgattccagagcctggcaaatttgactgctgctcatattatctctctttcaactgtgaaagatgtattcataggcatttttctcaagtttttatttgaaaaggctttgcccaatggcccacaaagacctggggtgaaggcaggagctggaatgggtttgtccttacccaaatttatccttcactggcctgatgctgcatggtggttcctggggataactgttcctctggtccaaagtatcacaatctaaacagatttgcagatgttcagcttccgttttgcctttatcaagttcaactgacagtccagtgggactggttgcatttgtgccatgcactccagccctctccctcccactccccaccccagcatgtttccctgaggaactgggagaagctgcagctgttgcctctggtttccttcagctcctgccacagcagcagttcttcaaaatttcattacttgtctatattttcagtaaagtcactcaacactcaccgttgtcctgctttccccagagcatgtcaccttcagtcttcaagcaccagataattaagttgctagcaaggtgctgcagagagggaagccatgctggaaatcccaggctggcagaaacctggagtggaactctcttcttaggacttcatttccatggccagaaggaaagcagccttccctaaattgcacctgcctcaaagctctattgccttgacctcaattaaaaaagaaattacgacaacatcctttaaagaatgccactaacagcctcttggccttctacgggatacagcagccaatttgctggtctgtctctatagaaattgtttctccactgtgtggagaaaataaaatccaagatggagatggttatgtaagaggtatctaaatgggatctgcggggcataaggagttggatcccagtcatgtgcacacccagatgaaatctgacttgttgaactgggccaaattgtaacaccaactgcatttgacttgtactgtttatactgggcctgatcaccagcttcctggaaagacagctaggccaaacaagactgaaagacatcctaagctgttaaccagccatcatcaatcatgcactatatgaaaaccttccaggtatgtaaacttacagtaaacctttataagcccctgcccaaccttgcctgatggagccgcttgctagatctgtgtgtcctgaattgcaattcttaagaccctgatgaaaacaccttttgtttgtttgttttactgcagtgttggttttgtttctttttagctgacaactgtctcaacaacagatttcttttacccatgtgattgctacttaaaatggggtcaatgcccacatcccctggcagcttattagaaatgtaaagtctccacccccatcccagatcttctgaatcagaatcttcagtttaagaagctccccaagtgatgtacctttaagttagaaaaacacagatctagaccagtggttctcaaactttcctgagcattcaagtccctggggggcttgttaaaacccggatagctgggcctcactccagggtttctgattcttttgatctggagggaggcccgagaatttgcatttctaaccagttccgagatgacgtagacattacttgctgagaaccacacgttgaacatccccaagatagatcatcacttcagaaaccgtgatgaaagctctttcttccttcattttcaatccattgcagactgattcttttgtaaaatataataaacataaattataaaaaaatagaaaagacatgaaacaaagccctgattgattaacgttattgttagattcaacagacataaaattactgtcaaattgctgtaagagtttctaaacatttactcaatttctgaacttatctaacacagacccgtgacaaagagtttggagatcttgctttgagtagcactggtcacagcagcaactctaaagtacagtagggatacccctggggaactccaagacccctttgggggtccacaaggttgaaataatgttcgtaatgatgctaacatgttagtattattatgtatggtagagttttccagaggctacatgtaatgcaaaggattggactgctttaaatgcagaagcagatgacagaataccatcagttgtcttctttcaagcccgacattaaggaggtttgcaaaaaatataaaacaggctgagtgtgggggctcacacctataatctcagcactttgggaggctgaggagggaggcttacctgagaccatgagtttgagaccagcctgggcaacacagcgagacctccatctccacaaaaataaaaatattaaaattagccagtcgtggtagcatgcacctgtagccccagctacttgggaggctgaggtgggaggatcatctgaggcttcagtgagctatgatcgtgccactatacttcaacctaggggacacagagcaagaccctctctctaaaaataaataaggtaaaacagtgtcactcttgattatttctgatttttttggtttcagaaaatagttatttttataaaatataacaatgaatctgttactattattaaattaaattgttgaagcccctcagttttaatatctactgtgataaatatggactgtacagctcacataaacaaaagctctttatagttcttgatagttctgaaggatgtaaaggggcccagagcccaaaccgtttgagaacagctggtcccagtcatcttctgagaacaattgcactcatcttgcttgcgatttccaaatgcctgagtctgcggaaacgcaggcctgaggaatttggagcagaactgcagtaggctgccttctttctaagttgaacagtaggaaaaagaggggtgtagagtgtaattacgttttacttgttggctgtctgcccatacataggccagggtagagcttgtgactcattctctatttgttccatttaggactctgttgagcttcaagttacagatatcaccaaaaccgtggcttcggcaaattagatttgtttttctcacataacaagaaatatggaggtccattttagtggtttaataatgccactagtgactgattctttcttgatttttgctcccatatatttagtgtatggtcttcgtttcttatgttcatttcatggttccatctactttccaaagatggggaagggtgaaaggcaaaggtgtctgctgattgagccaacccccttcagtgtttcctgcttgcaacacatggcctcttctatctgcagtgagcgctaagacatgatttctaaccagacgtgctgcttgcctaaataaaatcaggattttttttaacaagaaaaaggggagaatgggtattgggaggcaactgtcagtatctgccacatgccagaatccttagaacttagcagaatgcctagccaagagtaaggctcaataaatgttggttggatgaatgagtgagctatattacatgcacacaatcaggtctaaggggtcacaaaatgacatcagagtcagatagagaatggtagtggggatagtaattgaactgatccatgcactgaaaaaggaggggacccttctaccccctcatcactcactttctcttaggccttccctgaggtctttatgttcttacctctgcaagttcttttcctccgttggcccctggtacctatatggtgacccttaatggagcagtcctgaggctctagaaaaacttacagcagccttatcttcccaaagtgctctagcccctaaaatactcctcctttacgccaaaagattctcttttcagctgtgtttaaagtgaaacaattttttattacgaaaaattttgaaaatgtaaacatgcaaaaaagataagcaagactgctataatctagagcaaaccaatctcaatattttgatgcatagccttctaaaatttttctctttctatatatactttcttgtttacaagtttggaatacatactatactgttttgtaattcctcaatttactctatcataaacatttttccatgccaagtaacaaatgtgtgctataattctaagtgttgctaccttggattccattgtaatgtttcatttgcaattgatctcacaagttcccacagctccacaaatcagacctcaggattcagatccactatgtcagctagggtcctatgagaagcaaatgccaagatagaaggagaaatgcaaaagatttaatggaggaaattctgtacagggtaaaggggaaggaaatgtgagtaggcagggagacgcttcagagtagatgcaggcctgactcctgtgaaaggaaaaagagaaggaaagaggtttgggtaggatgagtctatagactgcagtacagctctgagaaagtcacagccaggacagtgaggagcctcacagcaagaattgtccattaggaaagtcctgatagaaatggcctggttcttggaccctcatggagtttaatcatttgctggcagccacctgagtgtgaacattacagtggatctgaagttgcagcagctggaggctcttagccaaggacattcctctcagtaggtcctcttagaagttcatggatgtcatgtgaattctcacagagattctgtaatttccagcagagtatgtaaatggagcagaacctaattagtctagaataatgggccaactatcctgtgcccagagactaagctcttttattagggaaaatgtttaggaagccactcccatacactggccctttctggcagtagtcaggggacttaatgctttcacagtattgactgcggatgagctgttcgcttagctgacaacaaaagaaggacaaccaagtcagtataagcaataattaggagagaagtaagtccatggtgcatggtacaaagactcatgtgcttgctaagaacaataactctctcaggccaaggcaggaatgcattctgtgtccctcataatatgcatcaatctgacagtctgtattgatctctaaagattgactgtgactacttttgaagcatgcctcttttggctagcactgactggtggccctttttaactgtttcagcacactttgtttctccctctaatccagggaatgaaaactcaaatttatatgagaggctgccccctagaagctgagcctggtacaggaattttggtgcatttgacttgctgcagatgtactctctgaatagggtgtgagggaagcagggtggagttggggaagaagctgagctaggatatagcctcagctgtagtcctgcttcagactgattccacagggagctctggtgcctgagttgtaccacaaagttagtcccacctggagacaaggagacctgttttttgtacatctatattggtcagtcattggcaaggctgctccttatgggaaagagcacaaaatcttctggggaggcagctcctatttgactgaaaagggggcagctgggaactgtgtatcttaaacaaaagccttaggccaggtgtgttggctcatgcctgtaatcccaacactttgggaggccaaggtgcatggatcacttgaggtcaggagttcaagaccagcctggccaacatggtgaaaccccatctctaccaaaaaaatacaaaagttagccaggcatggtggtgggcacctgtagttccagctactcaggaggctgagacagaagaattacttgaacctgggaggtagaggttgcattgagccgagattgtaccgctgcactccagcttgggcaacagactgcgactccatctcaaaaaaaaaaaaaaaaaaaaagcaaaacaaaagaaagtcttatgattccaacatcagaagtcctacctataggaaaaatggggatgcagctgggtgcggtggctcacgcctgtaatcccagcactttgggaggccgaggtgggtggatcacctgaggtcaggagttcgagaccagcctgaccaacatggtgaaaccccatctctactaaaaatacaaaaattagctgggtgtcatggtgggtgcctgtaatcccagctacttgggaggctgagacgggagaattgcttgaacagttgcaggaggtgaaggttgcagtcagccaagatcacaccattgcactgcagcctaggagacagagtaaaactccgtctcaaaaaaaaaactgggggggaggggtgcaaatcgtcagtatatatattaataaaatagttataattaagcattaatcaggctggactttaacccacttcattgtaactgacagtctcacagcactagatactggccatttgcatctccattgttcccatagataggatttttgatgttagaatcataagtcttttgtttaagaattgcttaaggtgtttttgagatccagaattccagtgaaacggctgacaccaactagtctgaaaactcacacagaggaaagaaatcagcatgagaggccgggcgtagtggctcacgcctgtaatcccagcacttggggaggccgaggcgggcggatcacgaggtcaggagatcgagaccatcctggctaacacggtgaaaccctgtccatactaaaaatacaaaaaattcgccgggcgtggtggtgggcgcctgtagtcccagctactcgggaggctgaggcaggagaatggcgtgaaccctggaggcggagcttgcaatgaacgccgagatggcgccactgccctccagcctgggcgacagagcgcgactccgtctcaaaaaaaaaaaaaaagaaagaaatcagtatgagaatacagtttcttcatctccctgtcctatgacttcaccctgcactctttgaccaatcaatgatctccacatttcagcccactccaaacccctgaaaacctctgtccccatacatcttggggagacagatgtgaggcttcctcttgtctcctcgttcagcagttttgtgattatacctctttctctgctgcaacccggtgtctcagcatattgacctggctgtgcacatcaagcaatggacctattactgctacaatcacatccattcacactccagccagcaggaaggagaaagggcaaagaagggcaagcaccggcctttgaaggatgtttcctggaagttgcagaatatataagtgaaaatataagcattttcacttacatcctgttggttaggaggtaactacatagccacatccaagtggaaggaaggctgagaaatgctttacactttcggcccaacctacttttcttatttattcccttttactcatcttcataaattgctcattcattaactttctcacacattcaccttcacttgctcattaaatatttactagtatctattttgtgctataccttatactatccattagatagtcaggggtagatcagggccattgtactcaaagagtttctatttgataggggtgaacaatactatgaaatgagtgagaacaatacattcttataggtgctaagaaatatttctgcagaagggacaaaggctggaatggtggattttacttgggggaactagaaaatattcatcaaggaagtgacttttgaactgcatattgacaaaggctaaattagatatgtgggaagggcatttcaggcagagagcatagcaggaacaatggcttggggttgtacacagcatgacccatttcagaaatggcaagactctggcaagtgagaatctatggtgcaacaggggctgggaggtagaggaaggagactgggggcagctgaagttgaggatacaggcaggggcggattctggaagatcttaaaattatcataaggctgtgagttgccaacttccagcacaagcaccttatatttatttatttatttacagatagggttttgttctgaaacccagccaggagtgtggtgcaatcatagctcactacagccttaacctcctgggcttgagtgatcctcccacctcagcctcccaagcatctaagactacaagcatgcatttccacaccgagttaaagcatctattttttgagggcttctgtacgtttgggagcttgctctgtccatatgcttgacaggctagaaataactgaaaaattatcacttccctcttcccccaggaatagccttgaaccaatgattaaaaagagttggtggctccttggccctgagccccagttgcccaaatagtaactcaaatagtaacttggttggcaacttaccttttattggtctccatcccttctcttattctcttttctctttaagggtattttttggaatcaacttctaaatatatttcttgcactagaattctgcctctgggttgacttctaggggaactacacaaaacaattgtgtgacttttactaaaggtagattggcaccatgggatgactatttactaacagccttagcaaagtaagcttattgaagtgaggacttggtctcatttatccttgaactccttggcccataaaaggcacacaacacacatttgttacataaatgaatcaaacttgtcggataactttaaggtaaacgttagacaaccccagttcagaaatgacgctggacagggactttctcaccagctgactttctttgtaaactcctctgccatcctccctcaggctacctgttccatcttgaagaccctacttatctttcgcctcctcaggctattaagattctccaaattcctctccctttatgttcagaactattatccagctctctgtttatctacgttaaccaattctatcatgaggcctctcattctcagaagcctcaaggtattttttccaaacaaaaactgcctctcccagaggttatttcttaaaattgagtatgttattccctaatcttgtggtgagttaggcaaagcagatgaagaaaggtttagcaggttttggcctgggtgttgtttctataatcccttgctactagagagtcatgtggccaaaggtctcaagatttgtgactttcccaatttcttccttagataacatcactatttggctaggaacagtggctaacacctatcataccaacacattgggagggtgaggtgggaggatggcttgagcccaggggtttgagaccagactgggcaacatagtagaaacccatctctccaaaacgttttttgaaacctgggcacagtggtgtgtacctgcggtcccagctactcaagaggctgaggcgggaggactgctggagcccaggagctcgaggctacagtgagccactgcactccagcctgggtgacagagtgagaccctgtctctataaaaaacaaacaaataaaaatcactaatgtaaaatctaagattgttttctttttgagatggttttcagactgaccccccacaccaagactcgtgactcatgactcaactggtcctgtggccccacccagaggtggacttagtgcatgaggactgtttttcacactcctgtgatttcatccccaaccaatctctagacccctgctcaccagcttgtccataaaacccctaacgtctgagccctcagggatcttgatgtgagtgcaatgccacggtctcagtgaatcagttttgtctgtgcactgggcaggaagaactcatcaggtgattacacattttagaaacaaaccaacaaaaaattaaaggctgcactgactgatggtcagttttctgatcttgagtatatattgactcaaaatgcaacatgaatgaaaaggtatcttttattggtcattatgatccaaccaaaataaatttctgtcttatcaaccttgttccctgaggaagatgaaggagctgagtaatcatagtccaagtccttctctctgggtctgaaagggagacacaccagtgagaaagaagcccccctttatttactcaacgctggaagaggctaggtctgaaagcaagggcagggatggaaagttggctgtgtcctgggatcactgagctgaaattacagctctccctggtctagggagggtggaggcctgtgggcccagccttgaacagaagaagtctgggatttcctcctccatcctgagatggacacagctgagccacttcctgcaggggcctcaggagaacaagatggtgccattttgttctctttgtccacatgattcacaaatgggggactttttttttctgtgagtgcctgatgttaaagagaacctaggtgaacacatgtgtgggcagcctaaagagacttaaggcaggctggagcatgttgctccattctgtccagcccctagaagattcctactgctagcatggaagtatgcctttctcattctcccctcctcccatcctcccccttccaccctatcaactacaaaaattaggggcagaatcaggctaggaggaaaacataactaatacatagaacaggctctttgtcatcttctcatagactcagaaagaccagcctaagaggtgagagaaacctttattccacacaaccttttggtgaccacacacacttccactttcccaaagcatccttataactgcccagtgagttcactttgcttcctgcgtaggaagagctgacttatcaagaaaagggaattgcaatagagaaagagtaattcctgcacagccggctgtgcggaagaccagaattttgtcattactcaaatcggtctccctaagcattcagggatcagagtttttaagaataatttggcgggtgctgggggaggggcagtgagtgaggagtgatgattggttgggtcagagatgaaatcacagggagtagaagttgtcttctcgcgctgagtcagttcctgggtgggggccacaagatcggatgagccactttatccatctgagtggtgccatcaagtgcagggtatgcaaaatatctcaagcactgatcttaggttttataacagtgtttttttttttttttttttgagatggagtcttgctctgtctcccaggctggagtgcagtggcacgatctcggctgactgcaagctccgcctcccgagttcacccattctcctgcctcggcctcctgcgtagctgggactacaggcgcctgccaccacgcccggctaagtttttgtacttttttttagtagagacggggtttcaccgtgttagccaggatggtctcgatctcctgacctcgtgatccgcccgcctcggcctcccaaagtgctgggattacaggaccgtgccgggcctataatagtgattttatccctaggagcaatttggggagggtcagaatcttttagccgctagctgcatgactcctaaatcataatttcttaacttttggctaattgttagtcctataaaggcagtctagtcccaaggcaagaagggggtttgttttgggaaagggctgttatcatccttgtttcaaactaaagactataaactaagttctgtccaaagttagtttggcctacacccaggaattaacaaggacagcttggaggttagaagcaagatggtgtaggttaggtcaagtctctttcactgtctcagttataatcctgcaatggtggtttcattagaatttttcaaatgtcacatgtataggaacacgagtgaagcaacaatgaccaataggaaaacaagaaaatctagacaggaacaaaggtagagaaagcagttctgggccaaggaaaacccactcagtgtcaccctcagctgctagggacgaacattcttgcaggcagtgtagatgaggtggggctggaagtgggagggatgagagttgtcaagagcccagaatctgaatgcctgagttcaaggcctggctatctcatttgtgtgacctcaggcaagtcagtaaacatcctttgtctgttttcttatctgttaatctcaggacacacctattttagggattagatttgttggagaattctttcctcagagcttagtcacaacaagtgctaaatacatgtctattattagtggtagtacaagtagtagtattatgatatcatcataaatgaaattagctattattaattacaaaaaatcaggcagaaacatagttacaggcccttattaactcgtgctattaagcctttctctagtggccataaatccccaaagttttttattttattttattttattttattttttatatatatacctaaagcatcattgttaggctatgccctgaagcagtgtcagtcttctaaaaacatgaacaaataatcatctttgtgtggacttttagggtaatcaaatcttcctttccagagtcctattagagggaacatgccctctttcttataaaggattttaaagtcactgttggggctcagaaactgataccccaaaataaaatgcatggacatgctgagctgaagaaaaagcagaagaagcctcaaggtcctcccctacctaagatccagacccaccaggaagaacaattgctttttctcaccctccctgcaagaccaagaatgtaaccacacctgagcagacccattctctgtcaaagaaaactatttacaaatcttccttggggtccatgccttctcactagtaaatcttcaacagagttcctcttctcctcccttccataatctgtttttccaagatgatatatatgcctccgaatctcactggatgattgggtcccctgtatacatgttaaataaaaaaggctcacctgtatacatgttaaatacatttgtgttcccttaatacaattaataattctcttaatagggaattaattccctatgaattatgctcatgtcagtgatttttgaacctcatcagagtgtgaggcccctacttcaagctctgatgctcagggctggacttagtgccagaaggaactaggatatcaactggtgtgcattctcagtctctcttccatgcagcatgatctgagggatatgctggctttggcagctatctccttccttgctcctcccttcttttcttccttccctccctccctgtctttcttttttctgtttgttgtattttggcttctgatgattattcccgtctttgaaagaggaagccctaacagaaagggccaatagcccattttcatgcccactgctctgccctgactctaagggcacaccagcatgcttgttaagactcctcacaacatcccttaggccacaaatagctccttgtttgtgagttgctctttctggatacttagccatattttaatcttttgtattcagccctgggatggttcagccttcagcttttgtcactgtcttctttccccgactctagatggcttgaaggagacttctcagtcattttatataaaatggctcacatctgtaatcccagcactttcagaggccgaggtgggcagaacatgaggtcaggagttcgacctgaccaacatagtgaaactctgtctctactaaaaatacaaaaattagccgggcatggtggtgcgcacctgtaatcccagctcctcaggagactgaggcaggagaatcacttgaacccgggaggcggaggttgcagtgagccgagattgcaccactgcattccagcctgggcgacagaatgagattccatctcaaaaaaaaaaaaaaaaaaagaaaaagaaaaaaagaaaaaaagaaaaatctaggcgatttcaagggagtgttttctaatacagtagtggactttcccttaacatagtattctgcagtcaaagatatttggaattgctgtttagaataaactttttttttggattgtaaaacatgcaaaatctttaataaattaatattgagaaataaaattctaaaggcccccaactgactgaatgaatgccatcttggccaagaagactccggagaaaccttggaagttgaattcccagccctgatgggatggaaggtcaggcgacgactcattatacccctccgctccctgtcattaggcattcttcctaagggctaaccagaaaccagcccttccaaaagactccattgctgatttcaaccaactgcctgactgctgccttttccttttgtggtttccatgtagggactgacctgcattccttccagaaaagagaccaccaatcatggagtggttttggccattctgctgagtatgtgcagggaggattttcatgtcctctacttcaccttttgtggtgagagtatcaaaaacttcatgtttcagattgtgctaatgctgcctgcccctcccccctttttttgagatgggggtctcactctattgcccaggatcgagtacagtggtgcaatctcagcttactgtagcctccacctttcaggttcaagccatcctaccacatcagcctcttgagtagctgggactacaggcgcaggtcaccacatctggctactttttgtattttttgtaggcccagactggtcttgaacttgtgggctcaaatgatctgcccaccttggcctcccaaagtgctaggattacaggtgtgagccaccatgctcagcctgggcatgggatccactgagaggcatgaagctcaattgcacatatgcatatttctcccttcataaatattaatgactcctcctccagcttattgaatttcagtgtgttggccaccctgctgagcataaatcactatctcatttttcccaccatggaagtgtctgtttctggcttctgggtggagaccacacttcccggcctatcagaatggccaccctgcaggctgcaaccctttatgagagataaatctcacctttccaaatttatgaacctcatcattcttcagttgacaatatgcactgtaaatctgccaaagattaaactataatttataataattcatacacacacatgtaaaatgagagatagcacacatcagaggacagttttcattgaacactacttgggagatgaagttctaaacaatggaatacgccaaaactgttaaaaaatatgcaatgggcttatacctgatttcttagaagactgtttatgctatattaggtagaaatacaaattgctaaaaaatatgtatgttattttcattagaaaaatagcaggtgggcaaatgtaaatacatgaatgtaattatgcctcataggcatagaaagaagctggagttctgtctattacagtattacagtggaattatgactccccttgcagtgggagggtgtattagtttattctcactttgctattaaaaaaaacctgagactaggtaatttataaagaaaagaggtttaattggctcaatgttcctcaggctgtacaggaagcatgatgctggcatctgctcgtcttctggggagacctcaggaagcttacaaacgtgatggaaggcaaaggggaggcgaacacttcacatggctggagaaggagcaagagagagggggaggagccacacacttttctttttttttatttttttgagacagagtctcgctctgttgcccatgctggagtgcagtggcacgatcttggctcactgaagcctccgccgcctgagttcaagcgagtctcctgccttagcctcccaagtagctgggactacagacacgtgccaccatgccaggctaattttttgtatttttagtagagacagggttttaccgtgttagccagggtggtctcaaactcctgacctcatgatctgcccgcctcggcctccccaaatcctgggattacaggtgtgagccaccgcgcctggctgccacacacttttaaacaaccagatctcatgagaactcactcacctcactatacaggaccaaggagggatggtgctacatcattcatgagaactccatccccgtgatccaatcacctcccaccaggccccacctccaacactggggattaaacctggacatgagatttgggcagggacacagatccaaaccatatcgaaggggtgaattgagtggtgggagaaaggagataatttattttatagaaattttaaactagcggaattatgattttacttaactttttgagggcttcctgtattttttaaaagtagaaatcttacaaatctcaaggaacatgtctagtagaagtccttgctcactgtacctttaagcttctgctaatataaaggatttaggcgaattgaaaaaaatatatgaacccagtgttggagctttgggccttatttttatcatgaggaatgtttgtctgtcacttaaatttgaccattagcgttagtttcctgagagaaaaaatatctacctctctcagctttccaattttgggcaagaatgttcgctggagataaatacgtaagggaataaatgaagaataggtgctcatggttgacatctaattgctacagagttggggagtagaaaaatgagaatgtctatgaggaattgctttcttcttcctccaccttcctacctcacatcagccgaaatgggacaagttgttggttttctctcttaactgtaccagggagatattttaataattctttgttggcaagctcctggtacctccaatatctttcccctatcagccaattttgtgtccattgttcatagaattgttgctgtctttcaagaaatgggaaaactgttacagttaagtaataaagagataatgctgggtaacagatgtatgtggaacaaagagctagaaagatttcatgctatccagtgagttatgactataataatgttttctatttgaaacaaagaaaactggtggcaggttctgtcacagacttttactcgcttacttgtctttctgctatgaggtgtctggttcctgtctcccgtcatgacagtgaggctgaaggtttaggtgggttggggtggtgtcttatgttgaattggaccccaaggaaacaaaacctgagacaaggatttgaaagtaccatcaggggagtgggcaagtaagataagaaggaagaaaatcaatccaaggtgtgttaatgttgcttccccagaggcaactggcactcagtcctgctggggtcatctgggagactgtgtcctcagagttgatatgtccaagaggggaaactgaggcatttatcctccaactctcatttctctttggcttaaggctgctcctggagcatccctagcactgactgacagtcctgtgggttggctgagcactccagagaaagcccttagaggcccctaggtgcttgtaatgcgtgcctagaaaaggggagtgttaaggaggtctggacagggcgtgggcagcatctttcctaggtcaaatacataaagatgtgatgctttcacctgggcgcaaaagttggactagcctgtcttcctgttaatattggaatagagcttggagaaagggggttaaaaataagggggttaaaaacaggaggcaaaagagagatagaaaaggggtaaagaaatgtgggagaaggaaaaagagacagcataaggtagagaaagctgcaagtggcagaccgtatcagcaaagtgtctgggttttttgtttttttgagacagtcttactctgtcacccaggctggaggggtggagtgcagtggtgtgatgttggcttggctcacagcgacttccgcctaccggcttcaagcgattctcccgcctcagcctccagaatagctggcgcctaccaccatgctggctaattttttttttgcagttttagtagagatggggtttcactaagttggccaggctgatagcaaagtgtctttgtactggaggtcaatggcattgtctacatttgtgcttattcacaagataatgcaaataggtggagacacaatggagtgaagacaatgcttgcaatagaagtagttgctgccatttaaaaagaactgggccccatgtaggttgtttcacaaagattaagtaactgtaattttcataagggccatgcaacttaggtatcattgccctattttgcagatgagcacatggaggtgtagagaagttaagtgatttgtaagctgccacttgtgagtatcagaatcagctccaaaatccatgtttttccccctacagaatgttacacaactcagaatcatcaagaagaaaaaccaaaactgaacttggagtaagggcagacattggctgagtatcctcgacattatatttctggctttgacacaaggacgtgaccagtgtgatttggcaaggtgggttcagttggtatcaattcccgggccaccaaggatggaagcactttgcacagaatcaggcttgttttgccttccaggatgccatacactgtggcctacacctcagtttcctgtacagagcccagctccccgaggactgcaaaccccgaggacagctgatgatctcattcttggtgtggcgaacatccttgctattctcattatggaagcaacctcaccagcagtaggtgatgactgcaactaactgtttaggggggcacctatactcttaggaataactgatcttttagggtaggttccctgaaagcagagcctgataagaaattcttgtgtaagttactcagtgggagaaagtgcccagaagactcctgtaatggagtgagggaaggaggacatgcaggggaaaaagctaggcgaggatgaggtctcagctggagactagcttcagctttatcacacaggaagctccagagcatgaattgcacttgaatgagggccagtttgaggcaatggggctgaccatttttacatccatgctaattggtttctgaccaaggtctgccccatggtgggtgggaactttgtgtgtgaaggactcctatttgatcaaaggtaatttcttggaggggccactggaggacagcaagcttgggggtgcactggccagtaaaggccatttgggtagggcactaagagcatctacttcaattggatgacaattcatttccagtgaggatggggagcaaggtcctgtgtgaatgtaagaaagactactggctgggcgcagtggctcaagcctgtaatcccaacattttgggaggccaaggcgggtggatcatgaggtcaggagttcaagaccagcctggccaagatggtgaaactctgtctgtactaaaaatacaaaaattagccaggtgcagtggcgggcgcctgtaatcccagctactctggaggctgaggtaggagaattgcttgaactcgggtggcagaggttgcagtgggcagaggttgcagtgagcagagatcatgccactacacttcagcctgggcgacagagtgagactccattccaaaaaaagaagaaagattactaagccagaagacatattggctataaagttagtaaaaaacctgcaagagcaatcactggagctgcataatgaagtcaaatcaatacatgtataaagattgctatgtgactatctgtacaagtaataggcaagaggtaactagactttcatctttgctctgaagtgagacctgcgctttttggacattttttcaggaactagggaggacccaggagtgacgtgaccacacgagtcactgactttttcaaataaatttggctaacaagatttgttgggctaacaactctgtgtaggacgccttccaggcaactcaaatgagctaatcctgcccatctcatagagtgatccagggatgtcaggagagcacacggaatattttccatacctgagaagacagccagcatctcagtgtcatagcaagcaatgctgtgctagcttcattgctctatctgatacctggaggagacgacttcttaaaacagtcctgaatctgatcccaatatccaacttaatacactcaccaagacctctacgtagcttgctttatacttttcttatttagcttcagctctttaaggacaagagccttgcctagctgagtacctgaccctcaacaaatgtttatttagcaaatgaatgagagctgagtatatgcctctgatggctatataagttctctgctcaaacccatctacactgtgacttctgacgctgagccccacacccttcatggttcccttgtcaggtgccttcctggtacattataccactaggagattccaagggagattggaagactggaagtggggcagagggatggggagagactttatcactcttgttttgctgctgtcctgatcagcatggctccagcagtagcactttccctggtggcaccatctggctctccttttcagcttctgtctcccaggaccacccccatatccccatagaaggaccagcagcagctaggtgatacatcctcttcatcgttctatctccatggggcttgtcctaggttttagattctatcagaactcaaatttcttccctttgttcgcctagccattagggtggaagctacttcctgcagttactaccttagcatttcctttttgcttttctccagtatctatgcaattatattctctttgttcaaataccttaggtgcctttggttttttgactggccgctgactcttttccattatcttttagcaaaactgtgatgtagacattgctatctccattttgcagatggggaaagtagtgcaaagaattgttgaggagtgtcctcaaatttacacatctaggacatcttagaaaaggtgatatgctttagtccaagagactgcattggaatcctgccctcattatttatatcgttctatagtttttaatttacatgcagcaaaattcacccattctattgtatggttctatgagtttagacaaacacataaagtggcataatctccaccacaatcaagatatggaatggttccaacagtttagaaaaatcatgctgttccattacagtcaattcttcccctacccccagatcttgacaaccactgatcattttctgttcttaaaattttgtcttttccagaatgtcgtataaatataactttttgagtctatcttctttcatttagcacaatttatatgaaattcatccatgtttttgcatgaaaagtccattctttgttgctgaatgatattcctttacatggatgcaccatagttttcccattcaccaactgggagaaatttgggttgtttccagtttttggtgattatgaataaagcagctacagaaattcacatatggtttttgtgtgaatataagcttttgttttcttgggcaagtacatagaagtgggaattctgcatcatacagtaactgtatatttaactttataagaagtgacaaaattgttccaaggggctgcatcatcgtgcattcctaccaacagtatatgagagttctagttgctccacaaccttgtcagcacttggcactttcagtttttgtttatagtcatttcaacaggtgtatcatgatgtggaatattgttaaaacatctggaagagactttcggtcacataagttcatcttgaaagactgtataatgttgttgttaaggaattcagacactgcagccagctttggtgctcactacctttatgaacatggacctcagttttctcatctgtaaaatgaggataataataggacatctatcttaaaaggttgttatgaagattaaattagttaatatatgtaaagcactgatagagaataagtagcacctaactgctaattattattgctgttatttttctcagctctggcccatcctgcttagctacatgatgccaaaatttgcagaaagacaaagttgagaggacacttcttggattccaaacaataaatcttaaagtcttttagtttgcatcttctatcttttttttttttttttttgagatggagttttgagcccacgctggagtgtaatggtgtgatctcagctcaccacaacctccgcctcccaggttcaagcaattctcctgtcagcctcccgagtagctgggattacaggcatgtgccaccatgcctggctaattttgtatttttagtagaggtggggtttctctatgttggtaaggctggtctcgaactcctgacctcaggtgacccgcccacctcggcctctcaaagtgctgggattacaggcgtgagccaccacgcctggtcacatcttctatcttttcaaatcactgcaccatagatttgtcttaaagccatttcatatataatgcaatgcccatccttactttgcaaaagtccaattttaaagacaacatttgaacttcagtgattaaagacagcttttgaattgttatagattcccatctccatccaaacaatatgcttttaataggaacacagcttgtgatttataccacttcactctgctctgcagtgtggtctgcatcatcaacattaagatgaaattaccctgcaatcacaaacatggaactcatacttgtagtaattgcacaaagaaaaacctcattatcctgcaatatgcacttcaaaaacaaacatacaaccttttctccctctagtggcacatttaaaaagcaacctcaactatcacagaggccagttttgcctattacaatcgagagaaacaaatagtttacacttgggagattcatagtatttgtttatcgtcgattgtagtaaaaattttgcagtttgtttatgtaaaatgatattgctgacaagataacaggctagatcatagccataggaattctgtggtttatcctcacttggcgctttatttttcatcaaaaacaataaagggaaatctacaagcactaggtagtcagctgttccgattcctggttacctcttggaagaatgacaccacttccagttcctcgcccttgccctttatgtgtttatgggctctagagctgaacaataatgccttactgcagaggttgaatagtgcgccaaaatttatgtctacctggatcctcagaatgtgaccttatttggaaatagggtctttgctgaagcaattagttaagttgaggtcatactggattaggtgggccctaaatcaaataacttgtatccttataagaagagagaacatacaagatgaaaaacacacaaggaaaaaatccatgtggagatggaagcagagattggagtcacttatcttttttttttttttttttgagacagagtcttggtctgttgctcagcctgaagtgcagtggcatgatcttggctcactgcaaccttcacctcctgggttcaagtgattcttctgcctcaacctcctgagtagctgggcctacaggcacatgccaccatgcctggctcatgtttgtgttttttgtagatggggtttcaccatgttggccaggctggtctcgaactcctgacctcaagtgatcctcacgccttggcctcccaaagtgctggaattatagttgtgagccaccgcgccctgccctgtagtgctatatctacaagccaaaggatgccaagtgttgcccataaccacagaacctgggagaggggcatgactagactctctctctgagtctccagaaggaaccaactttggcagcaccttgattttggacttctggcctgttgcactgtgtgagaataaatttctgttgttttaaaccacccagtttgtggtaatttgttataatagccctaagaaactaatatacttactccaatggataaaaacaacaatgaccatgatttcaaaaattttgtgtaaattaactcatttaattgtcaccataacactgacatagctactattattatactcactttacagatgagtaaaactgagtttcagagaagttgggtaacttgcctaagggtgtataatttgatattatttaggtgtggcagccatatgttctctcatgccttccaagtgcctgagattgtcatatattttctgttttcttttcaattgagcctccacctctgaggcttaattcatcttcccacctcagcctcccaagtagctgggacaacaggcacatgccactgcacctgactaatttttttattttttgtagagatggggtttcaccatattgcccaggctggtcttgaactcctgtgctcaagctgtccacctacctcagttttccaaaatgctggaattacaggaatgagccactgcgcccagtcttctctgttttctttacgtgtttgctagtttaaaattttgctttattgaagaataaatttaaactacttaacagtttaagatacagtaaactactcaaatcttaaatgtacaatgtgataaatttttacacgtgtagatatccgtgtaaccacccctggaagacctgccacgactcttcttagagagtatgatttccaggctttttaatattataatatcacacaaactaatataggttcttttctttcttttttttgggatggagtctcactctgtcgcccaggctggagtgcagtggggcgatctcggctcactgcaagctccgcctcccgggttcacaccattctcctgcctcagcctcccgagtagctgggactacaggcacccgccaccatgcccggctaattgttttctgtatttttagtagagatggggtttcaccgtgttagccaggatgatctcgaactcccaacctcagatgatccgcccgcctatgcctcccaaagtgctgggattacaggcaggagccaccgtgcctggccgtaatataggttctttataagactttcgaacattataaagctacgacaatggaaaatttctccctcacattatcccttattcctccaccaagggttaatcattgttaatgcatagagtgtgtgtccttccggaccttttctatgttatgtttgtattcatgtctgtggatacacacataaaacttgtataagcatatgtgtttttttgtttgtttgtttgttttgagacggagtctcgctctttcacccaggcgggactgcagtggcgctatctcggctcactgcaagctccgtctcccgggttcacgccattctcctgcctcagcctcctgagtagctgggactacaggctcccgccaccgcgcccggctaattttttgtatttttagtagagacggggtttcaccgtgttagccaggatggtctcgatctcctgacctcatgatccgcccgcctcagcctcccaaagtgctgggattacaggcgtgagccactgcgcccggccagcataagtgtttttgcacacgcgtattcaagcatatgcacacacatgcacacacagaaacacacagtttttctaatgtggtataatttaataaatatcattctgaagtttgctacattttcatttaagaaaaaagttctgccttttagaatgttcaggatagagctctacctggaaagagcagtacttttcctgctatcagtcatttctactttagtgtgaaagaagtttccaaatgaagaaaggtggaacagacattcctgctgggcccactccactccattcttcctcccggtagtcttattgcagcaggtagcgaagcaaaagctcacatttagcagactccgtgcagctcaggagccacatttcttcccagcagacagctgtgggatgtggaaggtggcagtgaatgagagactgttctgctcctggttgtggccaattgtgctttgtctgtagctgtggagcagaggtctcccgctctccaaaggcagcgtatgagaaatccatttatctgatgagttcctgcagctcaggctgtgacatggcttcccggccccagatcgttacagaggctgtgtggcctgggagccaggagaagggtatgtggcttcctgatggtggccaagacgcggggtggtgttctgggagtcacccccgggaactctgtccagagcccggctgctgtgctccagtggttttgcaagaccctactttcctgtagtaaatccctttctgtttaacatagggtggctctgacatctgcgattaaactgctactgaatcaggaaaaaaggaagcaggacagaggaaggcaacgactggaaagttctacttcgggacaacatctctgaattattcacatacattaatggaaacgaatcattctgactcattaatcaatgctgaaatgaacgataagcaaccgaggatgacctaaaacatttatatttggcttatatcatgttagaacttctaatttaacagagatgtttcatgccctggaagttcatactgctgctgggaaatcacaaagctacgttgggagcgtgtgacatcctctttcccaactcttctcactgagcatctccctggaggaggccaaagtcatctctcagactaagctcagagctcagtgaagctgtagggacattggcaacaactgcagcatcataggcatggcttgaatgagagctgtgattgttagtgatgtccaggtatgtgtctgccatctcagagtgaccctgagaaaggcattcatttggaagcttttctccccgcactctattctaagtgacccattgctcagtgcctattgcccagtggacattatgaagtcctggaggctgccagtctcctcactgtgactggagtcatggctccaggctctgccggcttcatgcacctggggagagtgaccagcagcactgcccagagtcccgtgctggccctgcaggaacaaaggccttgcaggatacgcagtcgtcgtgacatgctgatggcagattatgtgctatttgcacttttttttctctctctttcatgtagggatgcccaggttggtcgggacatttctgatgctccacctccatccctcagtgctcgctagtctgggcctgcaagcagtgttattgaacaaaactggggttcgctaacccagcgcagttaaatccaaacatccacactgaggtttgcaatgggagaaaggagagcatttattggcaaggcgccaagcaaggagaattaggcagctcccatttaagatctgacctcccctgtgacttggaagtaagggtatttaaaggcagagggaaatttcaggaaagcagaagttacaggcaaagtcataaatcaatacatggaggttgtacttcagtttgaccgaaaaaggtggggtatcttgaagtgggagcttataggtcataggtagattcaaagattttttgattttcaattggttaaggaggcaaagctttgtctagacatgcgaggtcagcggaaaagaatgtaagctctggcctgtggcgtgacctcctccaggcccctcaggaagaaatctagaacaaagagcagtggttccagttcagtcctcagttcccctcagggtctgcaggccagcagatccatctgatgggggtctgggtttctgaaaaacaccttgggaacatacgttaagatgttatctttagcttctatagggaacaaaacatctcatgactctaacctccctggttattgttttaagctactatttccttcttgcttatcaggttactcatttacttctcagggctacctatgttcttttcccttgaaggaacttgagattttcctttatttctatgcttagggggatcttgcaggcccctaccaggggtccctgctctgtctcaatgtcttcctactttctatgacgagtctcttggactctcttcctgaggcctctctgtggtgttaggaacaggcctggcctacttgcatggcagaggggaatgtgtggaggagttggtgccccaggagtagcccacagccagtggataccccagcttccttggccctgaaaggagaagtctctaatgtgtgtcccacaaaatctcccagagtttgccagtagttttaagccccatttgcccatgtctgtaacctgctcattaattcacccatcctttaatgctacaagtctggctgaagtgggagagatcatggaataaatattgaaacttcatccttcgtttgaatgtttataaatataaatagttatattgcatcataaaagtgttgaatagaagtcattactgagaagtaatcttacggatttttaaaaatctttaagatgtttgaactggaaggcatcttagcattattagcccctgttttaatttatgagaaaactgagtatcttttgagttttttagggaggaaaaaggctttcctctatactcttaggtttggtgcctgaggactgtaaattgaatggacaaagatacattaataggagaagaagtacaacttttattgatgctaagattttacgtgcatgggagcttctcagaaaagaaatgaaaacacgaacaagaggttagacttgggggcttacataacattttaacaaggagtgataaattgtggaaaaacaactacacaaaaaatgagaattgagggtttttacgggtgataaattgtgggaaggtgactaggaaacatatggagaaaactaatggaagatcagggctatttatttattttaatagagatggagtctcactatgttgcccaggctggtctcgaactcctgggctcaagaagtctgcccatctcagcctctcaaagtgttgagactacaggtgtgagccacggtgcccaggacaataaggattatttcagtaaggtctgtttatgcacactaatctttgtgtgactttccatttctggtaataaaagtcagtgtccttttcctggtacagaagagcaccttcctcaaaggaaaatttggtacagaagagcaccttcctcaaaggaaaatttatgctctgctttggggcagataagggaaggcagagaaattttcctgcatttgttgtttctcaattgccttcagtttaaaataatactcatgccaaagttacatattttggggtggcatattctgatcccctttacattctaagagaacacatgaggatccaaaaaggaatgagttatgtaatgggtaatcctgacatatagaacatttgattcaaacctcagaattaagaagcagaggggaaaactaatgaccttgaactgagagtacagaacacaaaaaccagaggtgtgtcagggatttctacattgtatgccatggaagagaaatcagaaactctgaatgttaaagtcaaaagggaaggcagaaagccttccccttcaacttgtcagctttaatgataaagaaatacgggtgtagaaaagttaagtgatttgtccaccatgacatagatagatagataggtaggtaggtagctagatagatagatagatagatagatagatagatagatagatagatagatggaataaatgattatagggcaagataccagttggaaggaacagaaatctcaactcagagtggcttaaacagtaagaagattgctatttcttagaagttgctggagaatagcatcagggtgattaattcagtgattccacaaggtcatcaaggatcacattccaccctttttcagctgctcagacctccacaaatcttaagattaactcctttatggctctcaaatggctccctagttccatgtgttgtttgcacttgggtatctgtccaacagaaagaaataaagctatttactctgaggttatttccttttgtcagtaagacactgacaaaagactccacccagacttctctcccactttattaaccaagattacacagatcacacattttatcgactaacattaagaaaaccactgactaggagattcccctcctttctacccttttgggctggagagactgtcgcctgccctgtctgcgtgattgcacagtaaggtaatacacagaggagggtaaatacaggaagggattagattaggaaccaatgtggtctgtctggaacccagcatccaggaactcttgggacccaaaccaggtttgctgcagaatttggagacatgtccagtaaaggttgttgaaaattaagaatgatggtatggatgatgagggtgagatgctccttaaattactgtaagagatcaaggctgtcacctagactctcatcaataaagtgttgacttcataatagaagatgaatcacattcttggagactgtaaggagtccatgagtaggggctgtttgtggccaagaataatgcaaattaaaaatgagagtagaaattcttccaggcttcccctgtatgaaagagagaggggtgcttactttatctcactacaattttgttcatggaaagagacctttttgtggcagagtaactctgctagattctgccacatgcagaatagatgatcacacaaggcctcctgtgttcctttgcactggtgttctgcctctctgcaatgactgaaagcaacactttactgattactttggctttctaactacctttgtcctaggaaagaggtgtcttggatgaagaatttgagtactttgaatactgaaaagacatttcctctgctgcagatttataacctggcatcattctaatgtacagattagtcttcgacggggtgggtctgtgtattagtccctctgatcagaactggaaaatgaacaattttaatactggatgtgcgacgacgaggcccagaccacaagcgcatgttgtccatgccaagggatgactttggaggccctgtctgggctatcagctggccaacccaggaacccagctatctcccctcccttcacctactgtctagttatcactgcatctcaagtcagggctctgtgagctgacacatatcaaacccgatgagctgctcatggggaggtttcctgattccctcctgccagctcccctgtagtccttcagccagcttcagactctcaattccccagccttccccttgggctgtgcagacttggagattgatgaatgcactgggccacaggaagctgcacagagttctggcctcctggaggacatcaatttggctcccccttttccctttagtggtaattgaatgtcaggataacagatgaagggtggggagaataaaccacattctcactttccacaagtggggggaaaggctttgtggagaaaggaagggttaaaatgttaagacctcaagacttaaatttcagttaagtttggtgtttgttgttgttattagtttggagagaatttggcaagaaaatgcaagtacatcctaatttctcaactatatggtgactaaaaaatttctttataaaactggatattggacctggcgtggtggctcatgcttgtaatcccagcactttgagaggccgaggcgggcagatcgcctgaggtcaggagttcgggaccagcctggccaacatggcaaaaacccgtctctcctaaataatacgaaaattaggggggacatggtggcacttgcctgtaatcccagctactcgggagactgaggcaggagaatcgcttgaacccgtgaggtggaggttgcagtgagctgagatcacaccactgcactccagcctgggtgacagagcaagactccatctcaaacagataaaaaataaaataaaataaaataacttgatattggccaggcgccatggctcacacctgtcatccaagcactttgggaggctgaggtgaacccatcacttgagcctaggaatttataccagcctcggcaacatggcaaaaccctgtttctagaaaaaatacaaaaataagctgggtgtggtggtgcacacctgtagtcccagctactctggaagctgaggtgagaggatggcttcagcccaaaaggtggaggctgcagtgagccgggatcacgccactgcactgcagcgtgggtgacagaggagtgagattctgtctcaaacaaaacaaaacaaaaactggagatagacccatccaacgagaaacctcctagatagtaggaaaccagaaagaattctgagacagtggttagagcacctgcttagacatttatttactattatgattctaagcaagtcaactgaacatgtcggtaaatactgaaatacttctactgacattactatatgaaactttgttttttgttcttttgttgtttgctacataaaactttgataaactttgtttaactttatctggccatcctccatctccctccaggtgaagcttctgttttttaggaaaccactcccccaactcttggtcaaatttcatgtgaagatgaccccaaccacccctggatgtagcagtggtcagatgatccagtattggaaaatccacatattcaatagatccccaaagaaattggtccagcaatggggacaggacccaagcaaacctaatgactttattctgtgatgcctctttgaccacttggaaaagagaagtcctctttcctagggtattgctagccataggaagggtataagcctgaagatacagtggccaatccgataattatgtcactataaaggaaagcagtaatgggccatgtggaaagaggatgaggacccatgaagatgttgtttgaactgaatctagccatgcctattatgtgagttaataaattcctttttgtttaactctatttaagttggagaacttatacatgaaagaattctaatgccatcaacaagttatgtcagctttagcttcagattttatcccaatcaaatccgttactcatccgctctgctgtttccatccaaatccaagccagtataatgtgtccacatgttgtagtttccaaagagtagcttgtagccttttttttttgctagatttttttaattttttttctttttaaaattctcaattaaaaataatgtataatttacaaaaaatttgaaaaatcagtacaaaggtttcctgcttaccctttacccagcttctccaaatattaacctcctaatccatcgcagatgatgtgttaattccatgaagttaatactgatacaatactgttaattaacctacaggctttaatcaagcgtcaccaactgttgcactaacattctgttcctggacaaggttccaatccaggatcacaagttaatatagttgtcttgtctccttgagcctaacttaatctgggaccattcctcagtcttcatgattttgtggctctgagagttttgaagaggctatgtcagttattttacaaaatttccctcaatttaggtttgtctgatgtttcttcaagattaagttcaggtcatatattgttggcaagaaaggcacagaggtgacattgtgtccttctcggcacattatatcaggaggtacatggtgttgcagagcaggggtcagcatatttttctgtaaaagaccagatagtaactatttcagagttgggacaacacatgccatctctgtggcatatttttctttgtgtttgtcccggtgcatttataacgttttaaaagtgtaaaatgtattcttagttcctggtacacagaagtggactgaaggctggatttggcccataggccaaaggaccccagctgtagaggaaaccttggaaaacataagctgtaagggcatgcctctgcttcaactcctcttcccccacatttgtttttttacttcatttagtaaaagcttgagtcctgtattagttctctgcagaaacagaaccatggaatgaaaagcatgtgcgtgtgtgtgtgtgtgtgtgtctgtgtgtacagagagagagagacaaagaaagagtgagagagatctactttgaggaattggctcacttgattatggaggctggcaagtctaaaatctgtaaggtgggctattaggctggaaacccagggaagaactgatgttgcagttgaagtcaaaggttgtctgctggctgaatttcctcttgctctggtgagatcaatattttgttcttttcagactttcaatggattcaatgaagtccatccacaatatggaggctaatctgcttttctccaagtccaccatttaaatgtcaagctcactcagaaataccctcacagaaacattgagcataatgtttgatggaatatctgtgtgctgtcgctcagccaagctgacaaataaatgtaactatcatcagttcttaccaaagcttgtagggcccttcgtgatccagtcccagtaacttctccaaccttcctttcacactctcctacttgataactgtgctaggtctagaccagtacttctcagactctcctgtgcctcaggctcacctgcagggcttttgaaaacagatttctggaccctatacccagagtttctgattcagtaggtctagggtggcgcctaagaatttgcacttccaaaaatttctcaagtgatgctgatgctgctatcctatggttcacactttgagaatcactgttgtagatatgttcttcttctttctcaacaaacaaaaacaaacaaagcactctttcagcccagagcctttgtctggatgttccttctgccatgaagaatctttccctagatagttgcagaaagttcgatattggtaaatggttaatgactgactctaaacaaacaaacaaacaaacaaaagcctctttcacagcatttgctggtttctagtgtgtaattcctcctacctgattttgagataccaatatgatgcccctgaatgtggagttgggaagagatgttttccactggttcttgaggtccagtgtgagctggctcagcacaccactgtttgagtgacactttcaagtctctgctcaatgcaacctcccctgagaggcttccctgaccatctgataaaacagcacaactgtccgccaacccttctatttctttttattttagttcattgcatttatttctacctactgtaggtttcttcccctactaagtagtaaactccaagaaagcaacatttttttttttttgtctaattccatgctgtattgtgacctcagtgcctaggtggcagtaactatttggttcaatgaatgaatgaataaatttgtctatgtatttggtgtcagtctcccatattaacccactggtaattccactagggtgagggttttgtctaattttcttcaccattgcatcttcatccctgacacacaacaagtaaggaaggcataatttttgaatattttatttcttagaaatggagtctaactacacttcccaggctgaacttgaactcctgggctcatttaattcatcaagttgtgagaataacaaagaaagtgggaaattatgatacaaacgtataaagagctttacacctatccagcctctaaacatgtggaaggaaaatgtctagctctgtgatggagggagcagagacaaggaagatcttgggacacctctcccattttaataatcctatttgccagtgggaagaagcaaacactttaagtggaatctgtctcagggtctgctggtaggagaacccaaactgaggcacagggctatggggttatgattacttttcttggttgctactcttcagtttacagttgaagaagctacaaccttcacacaagttatgagagcacaagattgacaaggctaccttcctccaaagaagtgtttgcagcagctatttggagggagctccaatccaagaagccagaacttagcaaaacattctaaggatcaagagcaaataccctgttacagaagtaacccttttataagttggcttgtcagaccatgtccctgaaaaggcaaaactattcagggaacctggtgagtgtcagcccgagaaatatgggcagctcatctacatatcttttagtgaccttctggaatgacagccaagccaccaacgcttccctgtttgcaaatgatagagatctcatttctggggacgacaggattgatgtggcagccgcagtgccattagacctggaagatgctcttttctcattactgtctcctggcaacatagcaccagatgccgccgtgaatattaatgatcctcattcatgtaacctttagtgccttccttcaaatcacccaggctgcagccggggactgctgctatctgtttctgctgtttccatctcaacaaatctcttcttctcctcctgtttgagaaaagaattattaatgagatttttatctaaggagagggtttctgcctcttgatggagatgctcactttccaagccatacccatatttgctaacaaagataacggcatccccattctgctggagcttgtgacgaatcactttcattgactttatctgctggatggaatatgtaatttgtctaatatctttgcatcttcaaatgcagggcttaaaactaaacatggaattgggcaaaagcggaaattaaatatgaccagactctcagtggggttcatgctctttatcagctttcaccaactgcagggctggcatcatgcatgtaacgatgggtcaccccagactctgtctaactcgagttccttggcttctcacacaaaggcctacccttggaaaggcaaggaatatcaaattgcttccacccgggctgcctaactcctttagccctttgctttgtttctttggatctctgagatattggccagaggttcttcctgagggtaatttaaggcacttcagatagtagaatatccccacttttccctctgtttcttcccttcctctggtattttgtgataggtataattagtggtttcagaatacaaactttagagggagccaggtgcatgcatgaatcctggctctgggatcctgagcctgttcctcaaactcactgaacctcggtttcatatctgtaaagtgcgaataaaggcacctaatgcacccggtttttcaacacattaagtgatataacatatgtgaaatgcttagtccagtgtctggtatatagttaggactttaaaaatggttgcctggtgtggtagattgttttatcaatggcccttgatgaaacagtcttcctggtatggggcatgactcaccttgactttattttttttttaatttttaattttttttgagacagagtctcgctctgtcgcccaggttggaatgcagtggcacgatctcggctaactgtagcctccacctcccgggttcaagcgattcccctgcctcgaactcctgacctcaggtgatccacccacttcggcttcccgaagtgctaggattataggagtgagccaccacgcctgacctcatcttgatcagatccttaagatagttgctaaagaagatgtgcatggtgcaaagcatatttatacactgttcttaggggaacagtgttctactcagatggaaccctatgttggcctcttgatacttgttagcttttctaatgtgcattcaagaaatcattgagctgaggaaatgagtttacgaaccaatccagctcttctttcctgccttagatggagatttgtgggtgttctaggtcatcagagggataaaagcttctggaatctcctgttcctgagagcttagatagagggcaatcttgttgatgccttcttactccctcagggctgactttgtctcccagtggagtaagttaccacacacccgaaatggtccccaagtttccatcattagaaatatatttattggccaggcatgatggctcacgcctataatcccagcactttgggagaccaaggcaggtggatcacctgaggtcaggagttcaagaccagcctggccaacatggtaaaacctcgtctctactaaaaatacaaaaattagctggacatgttggtgtgtggctgtaatcccagctacttgagagtcagaggcagaagaatcacttgaacccaagaagcagaggttgcagtgagccgagatcactctattgtactccaggctgagcaacagagcaagactctgtctcaaaaaaatataaaaaacaaaaaaactccactcacatttgtttaggttaaactttgtagactctaaaagcctcctagaaaattcagatatcctcaaaggatgtcacattcatccagttaactcctcactgtgagacaggacatttatattgttgggcggccaacatggaggcattgctctagggcagtgctatccaacagaactgtaatgcgagccccaggtgtaattttaaattttctagtagctgcattaaaaagtataaacaggtgaaattaatttaaaaaaattatttaacctgtttcaaatgcttgttatttatttttattattttttttttttggagacagggtctggctctgttgctcaggcaggagtacagtggtgtgatcatggctcactgcagccttgacctcctaggctcaagcaatcttcccacctcagcctccaaagtagctaggactacaggcatgcaccgttgtgcctggctaatttttaaaattacttgtacagactgggggctccctacgttgcccacactgttcttgaactcctgggctcaagcaatcctgccaccttagcctcccaaagttctgggattacagatatgagccaccatgccctgccttctttctatttcaatgtataatcaatattaaataattattaatggcatattttacattctttttggaccaagtcttaaaatctagtatgatgtttgcacttacagcacatctcaatttgaactccccacatttctggttttcaacagccacacagagccagtggctactgtgctggacagacagattcagagacccagcttggtggattgcatagtggggacaataatcctaattgcatagcatgctgtgctcattaaatgagatcatgtgtgaaagttctgtgttatccttgtagaaccacacagggtgttttaaaagtctttgtgcagtttcaagctttaataactttagaagttgcaaacttacaaaaaccaggttttgaaagtttgattgtttaaatttgtttgacacatatttactgtaacaaattttcttttattattcatttatttattttgtggagacagggtctcactatgttgcccattctggtctcaaactcctggcctcaagcaatccttctgcctcagcctctcaaagtcctgggattacaagtgtgagccacagtgccctgtcatgaattttaaataatacattttaaattaaatttttttttgagacagagtcttactctgtcacccaggctggagtgcaatggcatgatctcggctcactgcaacctctgcttcccaggttcaagtgattctcctgcctcagcctccaaagtagctgggattacaggcgtccgccaccatgcctggctaatttttgtatttttagtagagatgttgtttcaccatattggccaggctggtctcgaactcctgatctcggtgatctgcgtgcctcggtctcccaaagtgctgggattacaggtgtgagccacagtgctctgccaaattaatttttaaaatgtgcaacagtttctgggtgatgctttccagactgtggattggtagcaggttctgttgctcttagactgtttttggtggggacagtgacatcaaaactgtgatgtatgtatggaagcctcaatttttggatgatcactagcagcagctgctgaaagtttacgacatttgataattgatgagagtgatacatagcataagatgatggtaatgttgaatttaataaaaacattactatttcaacattttcataattaacctttctggtgctctttgttgtaagtttgtagatttatacttctgaaataataaaagcttaaacttgtgccagcctttcaggcatcctgtatttatgttactcaccatcgaggtggtaagaattgcttttccccaatcactcctagcctgtctccacaaaattatccccaaaagagctatgctgcagagattgttatgccagctctgacggtcaagcagtctgtgatggtggacagcccttaagtgacctggaaaattcctcatcctaatttgtctttaggaagtaggactttctatccacctcagagaggtggcagacatttttcctgctctgtgggacaaagaaactgctttgcatttttctggaagcactgaagggaagaactctgcaactatgcacagtgttcctgttcctggacatttatataaaccgccatgtcttggtgaagcatagtagtaaaattgataataatgaaaaacctacaaggaatgtgtaaataacttggtttcaaaatcagtagactccatgaatttgaaggccgtgactaagattcacattcgtctattcagctaactttgtgcttattaagaaaaagcgtcccttcttctgaaacaaatagccctgccccagtatacatggattagtaagtggaatgtgactggatttcagcctcaactgaactatttgattgggtgtatttgtagacaatctgtacaactgtacatggtggccctagctactacctcttgagacagaaatagtacaatgaatagggcagaaatctagctggctcatgaaccagtttggatagaccaggtttcattggttgggctatggtccattcccttgcctttaaaaattaaacaagtaaaatactcagcttttgaagacaggaaaagtgaaaaacacaaaatgtcctaattttatttatttatttagagacagggtctcgctctattcccaggctggaatacagtggctgatctcagctcactgcagcctctaacccttgggttcaaatgattctcctgcctcagcctcctgagtagttgggattgcaggcacccaccaccacgcccagctaattttttgtatttttagtagagatagggtttcaccatattggccaagctggtctcaaactcctgacctcaggtgacctgccctccttggcctcccaaagtgttgggattacaggtgtgagccactgcccctggcccttaatgttatttggaagcagtgaaactcaacttctgacctctgccactagtctaaagacattccatttcattaatattttctgtcctttccccagagcaattgactatatcacatgtcacgagaccaaattacatttatttcccataatttaaaactggaatttgagccaagagaacccagaaaggaaaaaatgatttcttaacactgtctaaatggattgcactgttcccaagtgaggccacagcccttcagaccagaagagtacacacatgtacccaatgaatgaagaaataacactgaaattatgtcgagttcattttctctggctttgattggagattaaacaattcccaaagaatggtaaaaacaagagaaaatatacattccccatgtgtttgagcagatggcatacgaaaactcaatgaagtgatgataaaaatacatacccatagtattgacagttattggtgtaaagagaatttggaaaaatctaattggctttgatgatgaagacactattttttggcttcattagtctaactgaaaatggaaagagaatttgttcccagtttcagaaagaatttcagaactatccagacacttcctataattgcaccattacttttagtgaggatgacagatcaggaaatcttcattttctagtgcctttcctttttctctgtcacctatgcatgcaaacacatatatttcagtctgtcacaatttaatggaacagttagtttcctttcaacttaattctctccctcacagcctgtggtcataatctggactcattcagagaaatgagtggagacaaagctaacttttcatctaaccttgcccacaagatttcagaaaagctcctgtttcaggggctgtgtggagcagacaccattggtatatcctgcctatatcccgtcacacttaccattccaatgccagctgagggtatcctcctacaacatcgctactccacctgatggctttctctcagcctatgactgaaccaagtcagaaataccaaagagtaaatgccatcaggagcatcactcagtcagtgatggataacagctggaggatacatacctcagcttcctcccccttgagtgggacaactttgaagtgtgctctagactgtttcctctcctggaagagaaaggttgctagataaagggtgtccagtgaaatgtgaatttcagacaaacaacgaataattttttagttaaatatatactaaatatgcatgggtcattctcatactaaaaaaaaatgcattgttaattaaaaaattcaagtttaatggggcatcctggatttttgtttgcaaaatgtggcaacctcacctcaaagggattgagtctcagttgcccacatggtgacctgctgatattgtagcctgttctagcatccttcgctgcaccatttcacttctctcctgtggaggcttcctgggcttccttcctacctgaggtcaggttccctgtaagctgatctgggaatggggattctcacacaagtgagatatggaggaagtgcttcaggagaaacctgtaaagaaggtcaggggaaggaactgagcaaggacctggttttaggagaagtctggcttctgcctgatcccatggggcactggggaacatgactgacatcacagagttgtcatacctcaagtttgaagggactgacatttgccccatccccaactcctcacattagtcagtcagtcactggctgtggtctacccagatggggtgtaaaatggaggggacacaggaaggcaccagcaacatctacaacacctcctaaacaacttgccctcaaggtttgtttctgggcaagctgaagctaaaagcattgaactgctggtaaagtccttaatggcacctaattccacaaggatagtcattcctctaaagactaaattccatgaattccctgagggctgggactgcaacttatttgcaatacttcacacataataaatggtcaacaaatatttggtgaattgaattgtacatagaaacaaaactgatacatctgtaagataaacactaatacaaatcatatgtttgtttagtacttactgccatgtaataaactaggcactcaagttactccactcttttgtgtgtgtgtgtttggcggggattccgtttttatttttgattctggttgttgttttgggggtaactcttttccaaaattcagtgaacaaaaaccattgcaatcatgtctcagaaataccctggaactagtcccaagttttagtgaattagcaaaacacaggaactcaaaatgtcctgctgagtgtcactgaagcacagatggcagcggctaagagttggaagttgagggatgattaaagacctgctttcctgaaatagttcccctggtggtctctcctttttgtgtaggcagctaactatgtcaaggaaatgtgtggcaccacggaactgttggtgagggccagaaagcccacttgtcgaagtttccattgcttagagctcaagatgctgcctctcccaaagaagccacctaacccgactgacactgcttggtgggcactgaatctccagggtatgggcaccagaagaggaggagcaacagatgggatatggcagcacaagtgttgacgtgctcatcttgggcaggggcagtgccacccagctcttgtggagggagtctcagagggaacgggatgctggataaactggttttcatggaactcagtcagcactggatcacgtcagtcataaaagagaatggccagatttccaagcatgggaaccatggcaaaagcagacacaacgtgcctttgggtctttaagtgcccctgtttaaagacagaattggtcccagaggcagttagcccaccatcttggtgactggaggaatagaggcaggagcccagaaaatgatttccttttaaagggaaaggtctaggatatttgatgctgtgcaaggttgggatgggggcgtgtgtgcacattcagccaaaccctgggcagacagattcagtaggcaagcttcaagttcagagcatggagttggtagtgggaagcggtgaggactggataaaaatatagaagctgaagcaggaataagggagcatttaagaaaaagctaatggtcaaccactttggaaaactctttgaaaacatacatgaaaactacgcatttgcgtatcctgttttctggcaatttcactggttcctacatacctaacagaaatgtgtacatgtgttcagcaaaagttatgtgcatggagaccatagcagcattatttgggacagcacaaaactgaaataacccaaatgttcttcaacagtagaatggacaattgtggtctgttcacatcatagaatactactcaacagcagaaatctattattaaaggcaaaagcatggatgcatctcacaagcagaatattatgtgaaagactccaggcacccaaaagtttgtacttcaggattctgttgataatgaagtacaagagcaggcaaagctaacctacattgctaaaagtcagaagagtggtaatcttggtttgggagggattagtggctggaagtgggccctgcaggctgctggtgagctggtgatgttctatttatttatcttgttgctgtttacgttgttacaatcatgagttctgtttgtgaaaagtccccccagctatacacttaagatttattctgtatgtatattattctttttttatttatttactttttttttttttttttttgagatggagtctcgctctgttgccaggctggcatgcagtaatgcaatctcggttcactgcaacctctgcttcctgggttcaagtgatcctcctgcctcaatctcctgagtagctgggactacaggcacacgccaccatgcccagctaatttttgtatttttagtagagacgaggtttcaccatgttggccaggatggtctcgatctcttgacattgtgatctgcctgcctcggcctcccaaagtgctgggattacaggcgtgagtcatcacacctggtctatttatttttatttaagctctgaggtacatgcacaggatgcacaggtttgttacatagataaacgtgtcacggtggtttgttgcatctatcaacccatcacctgggaattaagcccagcatgcattagctatttttcctaatgctctccctccccctaccccaccttccgacaggccccagtgtgtattggtcccctccttgtgttcatgtgttctcattgttaagttcccacttataagtgaaaacttgcagtgttggttttctattcctgcatcagtttgctgagaataatagcttccagctccatccaggtctctgcaaaagacatgatctcattcctttttatggctgcatagtattcctatgttctgaatggtattgcctagattttcttctagggtttttatagttttgcattttacattgaagtctttaatccatcttaagttaatttttgtataaggtgtaaggaagaggtccagtttcagttttctgcatatggctagccagttctcccagcaccatttattaagtagggaatccttttcccattgcttgtttttgtcaggtttgttgaagataagatggttggagatgtgtggtcttatttctgagttttctattctgttctatcagtctaagtgtctgtttttgtaccagcaccctgctgttttggttactgtagccttgtcgtatagtttgaagtcaggtagtgtgatacctccagctttgttctttttgctcaagattgtcttggctataaaagttcttttattgttccatatgaattttaaaatagtttcttctaattctgtgaagaatctcaatgataatttaatgggaaaagcattgaatctataaattactttgggcagtatggccattttcacaatattgattcttcctacccaggagcatggaatgtttttccatttgtttgtgtcctctctaattttcttgagcagtggtttgtagttctcccttgaagaagtccttcacttccctcgttagctgtattcctaattattttattctctttgtaacaattgtgaatgggagttcattcatgatttggctctctgccagtctgttattggtgtataggaatgcttgtgacttttgcacattgattttgtatactgagactttgctgaagttgcttatcagcttaaggagttttgggcctgaagtgatggggttttctagatataggatcatgtcatctgcaaacaaagacaatttgacttcctcacttcctatttgaatacactttatttcttcctcttgcctgctttccctggccagaaattctagtactatgttgaataggagtagtgagagagggcacccctgtcttgtgcaggttttcaagcggaatgcttccagcttttgcccattcagtatgatattggctgtcggtttgtcataaatggttcttattattttaacatatgttccttcaatacctagtttattgagagtttttaacatgaagggatgctgaattttatcgaaggtcttttctgcctctattgagataatcatgtggtttttgtcatcagttctgtttatgtcatgaattacatttgtttatttatatgcgtatgttgaaccaaccttgcatcccctggatgaagctgacttgatcatggtggataagttttttgatgtgctgctgtatttggtttgccagtattttattgagaatttttgcattgatgtttatcagggatattggcctgaagttttctttttttgttgtatctctgccagttttttgtatcaggatgatgctggactcatagaatgagtcagggaggagtccctgcttttcaattgtttggaataatttcagaagaaagggtgtcagctcctctttgtacctgtagtaggattcagctgtaaatccatctggccctgggctttttttggttggtaggctatttctcactgcctcaatttcaaaacttgttcttggtctattcagggattcagcttcttcctggttcagtcttgggggggcatatgtgtccgggaatttatccatttcttctagatttcctagtttatttgcattgatatttattatgatgtatactattcttcaataaaacattaaatgaaggtagaaaaaaataaaaactattgaatagagaagacaaaattcatctgtgtcctaactttgctgagtgctccttgactatgtcattttattttctatagaatgtgcaaaagggggatgtgagactgaatttgggtaatcaaattgcatttacttttttttttttttgagacagagtctcactctgtcacccaggccggagtgcagtgacataatcacagcttgctgcaacctcaatctcctgagctcaagtgagcctctcacctcagcctcccaagtagttgggactacaggtgcgcactaccatccctggctaatttttttgtattttttgtagagaaggggtttaactgtgatgttgcccaggctggtctcaaactcctgggctgaagctatctgtgcacatcagcctcccgaagtgctgagattacaggcatgagccaccatgcccagccttcactgacttaaagtgtgaagagacaatagcttgctctatcttcctcttccctcccaaagcagatatccctactattcaattcctgcagatgtcattctgatccaggcaacctacaaaattggggctcagcctgtgagggtttgtggctttgctcaggaaagaattcaagaatgagacaacagtgaaagaaagcatgtttattagagcaacagtgtacataaaatggctgctctgtagacaaaacagggctatcccataggcagagtagcacagaagagcatctgtggattgctggctagctctgcttataccgactcttatttacatgctaaataagggacaggttaaggttattcatgaacaaggggtggagggttcctggaatcacacaaggtaactcctggatcattgccacagcatttgtaaactgtcaaggctctgatgggagcatcttaggcaaatgcaaataagcagtgagggtaactggagatcgctttcattgccatcttggttctagcacattttctttgccacatcccgtcttgatcagcagcagggagactgaggctcagaaaacaagtccagctgatctcctacctcaatcccagggatgcattaggtcttctgctgtttttgtgataatcactggaaaattgcacaagcacaaatacagacattttaaaacctttttaattaaattaattaatttattttttgagataggatcttgcttttttgcttaggctgatcttgaactcctggctccaagcaatactcccacctcagcctcccaagtagccaggactacaggcaagagcccatgcactcagttaaaaatgcagattattggttgggtgtggtggcttacacctgtaatcccagcactttgggagccctagatgggcagatcacttgaggtcaggagtttgagaccagcctgaccaacatggtgaagccccatctctataaaaaatacaaaaattatctaggcatggtggcacacgcctgtaatcccaggtgcctgggaggctgaggcaggagagtcacttgaatccaggaggcggagactgcagtgagctgagatcacaccacagcattccagcctgggcaagagtgagactgtctcaaaaaaaaacaaaaaaacaaacaacaacaaaaaaaattgcagattcttaagacaggccacagagataccaacaacagggatttcagatctttacattgccattaatacttcattatatgctaagaagctgacttttttcatccattattttcatcagattgtctactcattgtactttctgctggaatgtggcccagtttttaaatttttatttaaaaatttttaaaaagagagaagagtctccctctgttgcccaggctgggcaggcagtggtgtgatctcagctcactgcaatctctgactcttgggctaaagcaatcctcccaccacagcctactgagtagctgggattacaggtatgcaccaacacacctggctaatttttgtaattttaatagagatgaggtttcaccatgttggacaggttgctcttgaactcctgacctcaagtgatccacccacctagggctcccaaagtgctgggattgcaggcatgtggcccagctctcttccagttttcttaattcaaattcccaagaatccccaggcccagtttttgctaggctgatgaaaagcccatgcactgactaaagggctgttgaattgagtggcttctcctggactcatcaaatgtggtgctggtgagtcagtgccatatgacagaaatcttttggcaactttagcattaggggtctgtgggcagttttttctagaagagggtggtctgctcagtacacagacccactatttctccatcttcccttcttccttcagtcccgaaagtcaaattctcaaagcaatcgcttagtgtaaacttatttttttacctatcttcttctgagttccaccttccttctgatctaggcatagtcaacattcaaatttcaattttctatgctagataaagataggatgagccctcagaattctcagcatatcctgaaccttcacttggggcacgaatgtccacttccctttcagcccaatcattcatgacttccgtttggcagttgcaacaatgactgtttcattaattttccctgctgcctgctttctggcagcaatgagagcaagcagtgaaatggccaaacagtggtagacaggagggagcagagtggaggcagaagccagggtgctgaataatgagcctatgaatagcaagacctgaccgcaccaggcttcctgagcagcctggaggagaggatgggcccccccttggctgggagagtggatgctgagccatgaggaaacaccacaggattcaatggccttggcagagctataaagactctgctttcacttgaataaactcttcttgaacacatctcctatgtatttccacaaatctgttttctcagggtgttcagaattcattcctttttggttcttctgctgctcaaaggaaagagaaacccaagggatcaaacttctcagtgtaaaataaacacaattctttttggacctgctaagccagaagaaaatgaggccaaagaatgaataagacacacagctaaaacaaatcaaactgtagcaagccttctctcacactctcctttctacctggttgaatcaatggatgaacatgtcacatcctcttttctcagttgccaagagttggtttatatgttcttacttataatgtattttgttagttttgcttttggctttcctgtccaaaatcactgtcccttcactttacccacaaacgtgtaggctttctccatctgccccacatcccttctaaactcagtgatgacctaataaagatttacacacaaaggtgtcaatgacacatgatgttagaaaaggttactgcctcagggtcacccccatcatgttggtccctgccaactgatattaataatagggccttgaccctccaaccctacctgctaatgactaagacactctatacggagcccactaaatatgtacagccagctgcagctggggttcagatttcagccaagctctgagcacacatgttcccttaaatcagagtgtcttccccttcaccagagagaatgcctgaggactagcctccactcctcagtttcaccttgtttgccccataagttagctggaagctgatgtctggagtcttcaggtacagcacgctctcagctcctgagttagttccaaccaagggtgggcagataggctgtcagcagccttgtcctgctataggggaggaaaactccctctgccttcctaggttctggtgtttggtctgagaattaaactaacataagacagattaatagtaaaaaggcatacaaattttatttaatatttttacatgcacaagggaatactcataagaaaaataaatgcccaaagaaacagtcagagcacaccaacatggcacatgtttacatatgtaacaaacctgcacgttgtgcacatgtaccctaaaacttaaagtataataataatttaaaaaaaaaaagaaagaaacagtcaggacccagagcttatattataggatttttttttttaaagcaaaggataaatttgtggacaagtgacaggacaaatgggtttaggcagtaaattgtggaaaagtgtctacaaaatatatggggttaatggacaataagggttattttagtaggttcatttgtacagatccatttgccattgactcccaatctctggtgataagaatgctcttttcttcctggtacagagaaggcacctttcttatgggaaactttatgacttgcttttacatcaaaagagggagtgagatcagaaagccctttctgcatctgctgtttctcaagttcctttagctcagaataattaatacgccaaagtggcatattttggggtggtatgttctgaactctttcactaccaggagcaggtggttggatttgttgtcttggccaacaaaccaaataagaatcccagtcctctcctcccgtggggaggtggccctgcacccgtagcatgtgccacatgcctcccattgtgggctccactcagtgaatgtggatgatgcaacagtgagtagaggagacaagcttctgccttcttagagctcatgaatgtaaagtctatctaaaacgttttctggttaggaagagagagagaggccttggcctcccaaagtgctgggattacaggcgtgagccactgcgcctggcctgaacaatttgaggtaaattatacacatcatggccctttactcctaaatactttatttattttgtaagaataaggatattcactcttgttaccacactatagttatgtagtgctaagagggctcagaatgaagggatttgatctgcctagggaagccagaggtgctttcttgcaaaagtggaaattgagctaaaatctgaaggaaaggaagaacgggttaatagggattgcagagggaaagagcacgaagcagatggaacagccttccccatggagggatgggcacagctgtttaagaagctgaaagcaacaacaccagctggtgcacccagagagaggaaggtggggccacaccaccaagggcctttctttcaggcatagggactggactttatcataaagcgattttgctaagtggacaaagacaaggggcgggggagtttcatgtataggaatgaacactgttgcaatgaagggccatggatataacatggataaagaggggagtgaaggaatgggaagcctgaggggagaaaacatttggtctgtgcactccatgaccccatgaagtagaaagctcaagaagccacctgggagggtggggcaatttctgagcttgccttggtctcctggggtgtgctgttgggacagtgggatcctggatcagggagattctgggctgtgggtttgggagccagatccagaagaagaggaggtggcatcaggaggtgtgtgtgggaagtccccgagaagctagaacctggaggcttgggagctggcgtgggctgtggaagaaggtcagagcaggaacccgtttactggcctggctgatgctaggaatactttttaatattttgcgtaatattacaagtaaatataaatatacttattttcatttacataccgtctttgactatttttttccctgagagggattcttttaaaacaattttggaaaaatatcaaacttaaaaatgttaaagaagtaaaaatattaaaaggagtatccataaacccttttcccagattgacctcctattaatattttaccttacttgtttattgacatttattttttgagacagagtcttagtggcacgatcttggctcacggcagcttccatctcctgggttcaagcgattcttgtgcctcagccccccaagtagctgggattacaggtgcacgccaccacacctggctaatttttgtattttagtagagacagggtttcactatgtagcccaggatggtctcaaactcctgagctccagcaatctgctcaccttggcctcccaaagtgctgggattacagatgtgagccactgcgcccggcctgaacaatttgaggtgaattatatatatcatggtcctttactcctaaatactttatttattttgtaagaataaggatattcactcctgttaccacactatagttatcaacctgcaaacatattaatatattgctttatctgatctacagtgaatacccgaattccaacagttgacccagtaatttcctttatagcagtagtttttttcctccagtacaggattcagtctaaggtcaaatattgcctttagctgttatgtttccttagcctcctttaatttggataatttccatatatgtttggctatcatttttaatatcccagtgttttcctagttatcttcctattttgtagaattattggagcaaagctataaacatttgagcaccttttgtaaaatagactgccgtatttttccccaaatgattactagtttatgttaatgtactatgtgactatatctgttttcccacacatttgacaggaaacgtctttttttttttttttttttgagactgagtttcagtcttgttgcccaggctggagtgcagtggtgcaatctcagctcactgcaacctccgcttcccaggttcaagtggttccccttcctcagcctcccaagtagctggtattacaggcgcctgaaaccacgcccagctaatttttggtatcttaagtagagacagggtttcatcatgttggccaggctggtctcaaactcctgacctcaggtgatccacccgcctcagcctcccaaagtgctgggattacaggtgtgaaccactgtgcccggccagctgtgtctttttgttggtgatgtccattcagcagatatcaaatggaatggtacctcgttcttattctgctttgcattgccttctgtataggcatacgtttcccacagcctttgttgtcagattccctcttgtctgaattctacctgtccgtgtcttctgaggcttgttcttaaaagcagaaactgattttattgttgttgttgttgttagtttttggactttattcccacacaaatacctatcggagtattacagaataagtgttcttaaaaaagaagtatatttttagaaattttttatttttaaaataaagactagtaggcatggggggagtgcactagctcttgtggatgaaaacaaaacaaaacaaaacaccacaaatcagacacatttcctatttaacgtagctggagctggccagctggtggcagtttgacagaattgcaagcaaagtggaagaaaatcaagaacttgcacctccacggattttgttttgacagaatgttacatatagagatacaaatatttttaaaagttatcatctgtccaacagtttttttggggggtttttcacttctttcttcaaattccatgttactaattttctcagaatctttgtaaagagatatcaaggtaaatgtaaattatacagttgtagactggggagaggcgctaacctaagaaaacttccctggtggtaaataagaactattttttgaataaatgctttttattatttcttattatatattttgaataaatgcactcgtaatattccagggaaatgcgtaggttgaacaacataaaatcgacatctctaggatcaaagctacttcttttggaattgtatgaaacacaaaggatgtttcatgaactttctcagccccaccactcacatccttgcccaattctcttgcaggaaacttttttttaacttttttatttttgagcgcaggctggagtgcagtggcgcgatctcgactcactgcaagctccgcctcccgggttcacgccattctcctgcctcagcctcccgagtagctgggactacaggcacccgccaccacgcccggctaattgttttttgtatttttagtagagatggggtttcaccgtgttagccaggatggtctcgacctcctgacctctcgtgatccgcctgcctcggcctcccaaagtgctgggattacaggcctgagccacctcgcccggcctgcaggaaacttttttttgatgtacttatacaaaaaaggaaggagataattaagtgactgataacatattcatgttgtggagattttattcctattaaactgagtcaaagagtataagaatttcaaattttggggtggcgcggtggctcatgcctgtaattccagcactttgggaggctgaggtgggtagatcacttgaggtatggggttcaacaccagcctgaacaacattgcgaaaccccatctccactaaaaacacaaaaaattagccgggcatggtggtgggtgcttgtaatcccagccactagggagaatcacttgaacccaggaggtggaggttgcagtgagccaagatggcgccactgcactcctgtctgggggacagagcaagactccatctcaaaaaaaaaaagaagtttacattttaataaatgttctaaaattgttttgcctgtctaccaagttcatggcaacttatgattttatcagacattttattaggctgcctgtttcaccatactcttcccagagctgtaggcttttaatcttcctatttttttaagccaatctaagagttggttgatagactaaaaatccattctaaatttttcctgctaactttgctaaatactaactaataataggcctcaaaataagtaaaacacattatggtgttaagttaatctacctttcttgtgtacagagatttcaatgtattagctgcccaggatcaccaaatcaaataccatttacaaaattaggaaatacagaaaacaaatttgcatgcaattacagcatgagataggattactgatcattgctactcttggtgataaagatgcaacagagacagatggcatatctctaatcaataattaagggtgagtcaacatccaaggtcaatttgaaactatcatacttaaaagctgtttatcaagtaccagctagatattcaaatctataatatatgtagggttgaagtgaaaagataattgtgaagattactttatttcactgaaaaataaaacaagttattaatgattaactttattttctagtattttaataatctcagcagcaaagacagagaaaagagccaattttctcttttctttcttttcaaaattactcccagggatgctggcttattaaaatattaacaacagtatcttttgggtcttcaagtcatcaaggcaagtatgttcttcttaaatcatatctattgcttatttatatttcattgattttgcaaatgcttcatgaatggatctttttttgcaaactttaatgtcttcctctttaaacagaatagcaacattcaaaaggatattaaaatgagaatctctgtcttgcatttccagcaatacctccataggcttaaaacaaaactacaaatgctgagttctcccacatttcatgttgaggttgtaggtcatccatgaaaaagaactggttgctgatccaaccaacacccacctcttaggtatgaaagggatacacattcttttcccctacatttcatcaacaccttggagaaaggaaaagtgttgcttaccctcatctccagcctagtgagaagtgtactgagtgggatcttctcaatacatttgtttggtggagtttgagggtaataaacatgtgaatggtgactttaaagttccagttcttgtcacaagtctctgtcaatacataaaggctgccctctccttacatattatcatcaccaacttgttaggggttcctggtttacaaatccacaaaacctgtggcgaattagggaaggtgggcagcagagccagcatatgcactaatcatatctaaggtcaatatagattagggttggctaatttgaatatatccaattctagccaggatgtgaatgacaagacccatgggggtatcaataacagagaatctcctcatacagagaataagaaccacgggtatgtatagcttgatgggactttctctcaacacaagggagtgtgtgttacagctctgcttgcctaatgctggttggccaagttgccagccagaagtcctggacctcccttatacgaagcccttgcacaagatccaatccacagtgatggccttggcagatactagggagggagggaatgtccatacctactgatgctcacctactgtgccggtccatcagtcaccaactaaggtgactaaggccccacagagattaaggcactgtggcctctactccaccccaaatagacagttatgaatattaattaatatggaagatttagtttagatagattaaagtgaatagctctttgatatgttgaataacactacaagtgtcagtcattgggaaaggctacctctggtcagtttcctctcactatgtcaaagctggtagaatgactgtaccatttactggttcactgaaggtcttaacctccacagctttgacaaagaggccatgtgtcccatgctgagaagattcaaggctgaaagtggaagtggagcttcctgtttggtggaagatgactccagtggctgcatcaggaaacagagaagcataagacggtagagggcatgcttcctgtgggtagaggttattccacaggagcgtctggcctgggttcatgttataatagatcccattgaaattatttcctggctggagctcagtgactagacctggacgtgcttcaaggtgtatcttaggatgcagaagctgaggagggtttcatgagggaggctgctggtagaagagcatggtccaagtacagggagctgcagcctgatattccaagggaagaatcagtaagaaacctaaggaagtgcccctccagaaaccaagtcagctttgaaaatcctgcaagtccagagagcaaggatgtggacttagggcaggaatgcaaggtggtcagctccccagattcttgctcctcatgcccctctcagtggccagcaggctgcaggtggggcaggcggggacaaaagtagaagagtagaaggtggaggacagagagaaagtattgactacttctcactcccccaccagagaggaaactttatttttttcttttcttttctttctttttttttttttgagacggagtttcgctcttgttgcccaggctggagtgctgtggtgtgatctcggctcactgcaacctctgcctcccgggtctagcaattctcctgcctcagcctcctaagtagcttggattacaggcatgtgctaccatgcctggctaattttgtatttttagtagcgacggggtttctccatgttggtcaggctggtcttgaactcccgacctcagatgatccgcccgccttggcctcccaaagtgctgggattacaggcgtgagacaccgcgcccggtctttcttttcttttttaaagactagtcaagtgaagcagtgggagtggagaaggaacaaagaaatctgtaactggttgtgatcaattagttgtaaacaccactgcactcgagccggccacaaaggtaactttaaataaaatttagagtgttggttactatcctgcaataagaactttgcattttgtagagacagtttgaacatgtgaccccatgttctctttttactctcagaaactcaacaaatatagcagatcaattgttcagacaatatagcagatcaattgttcagacatgtaattacaggcagagacttagaagtaaggaaacctggctgggcatggtggctcacacctgtaatcccagaactctgggaggccaaggcagacggatcacttgaggtcaggagttcaagactagcctagctaatgtggtgaaaccctgtctctattacaaatacaaaaattagctgggcatggtggcatgtgcctgtaatcccagctactcaggaggctgacatgagagaatcacttgaacctgggaggcagaggttgcagtgagctgagatgccaccactgccctccagcctgtgcaacatagtgagactctgtctcaaaaaaaaaaaaaaaaaaaaaaaagcaaggaaagccatacaggcttaatctctgagtagcatgcatatagtaattttatcgttttgcatctttgcatttctattaaaatattataattattccttttgggggggagtacatagactatccttgatatgggaagatacttgttttgtccttaccagatgtatacatctttaaaatattatattttaaagcattaatcattgatgctaattatattaaaaagtatgttgggaggctgtaattagttttgaagggtatatcctaatcttgggaaaaggggaaggtgcttacttatctaagctttcataaataccatggataagtagaaatacctgtgtacctatgctatatccgcccagccatacacacatagacacacacacacacacacacacacacacacacacacacacccaacacattataggcaaaggccagtctgaacttaggaattaaaaaaaagttagatgtggtccccacctagaatgaatagacaaatagacagaaagcaatggtcgctactgcaaattgaattagtggttgcagagatgaagtacaaaatgaaaagctctttctcaaagcagaaagaacaacacagaaatagaaatcatgaggagaaaaaaagatttggaggccagatctcagagacctaagtgggactaatgggcattccagatggagaaatggaacagatggaagggagttaatcacactcataattgaaaactgtgcttgtttgacaaaagacttggtttgcagataaaagtgctcagagctccaaacgtgattaacgagaaaagacacactttagcacatcctggtaaaattatgagttaaggataaacagtaaaatgttacttttctaagcagaatagaaaaagataacgttagcatcaaaccgtggcttcattcctgatacaggccaagtccatattccccatgtttctggaactttcaggatccaaaagagagattttgttcctctcctatttggcttcactctgtgtggtagattaaagatgactgcagattctttttcactccctacagagaggtagaatttatttcccctgcctagaatctggggtggcccgaggattgcttaaccaatagaatgtgacggagctgttgctgtgccagttccaagcctagtctgtggagggctagcggcttctgcctcctgcttcttagaatgcttgcacattggcttctcatactcccaactcagctgccatgctgtgagggagtccaagccacacagataggccaggaggaggctttcctgttgacagcacaagtaagtttagtggtcagaatctaaatcccgggcaaattctagaatagagagactctaataatcctatcacacttcagtctctggtcatgctcagtgaactttcttaaaagaggtatccagtagattctataagcagaagattgcctccccttcccgttaattctcttttttttttttttttttttttttttgagatggaggagtttcactcttgttgcccaggctggagtacaacggtgcaatctcagctcactgcaacctccacctcctgggttcaagcgattctcctgcctcaacctcccgagtagctgggattacaggtgcccacttccatgcctggctaatttttgtatttttagtagagatggggtttcaccatattggtcaggctggtctcgaactcctgacctcaggtgatccacccacctcggcctcccaaagtgctaggattacaggcatgagccactgcgctcggcccccagttaagtttttataatggaataatgtatgtgtatatatatatatatatatatatatatatatatatatatatatgggtttttttggtgtacttctggagaccttgctatagcatttaatcctctccgttgccagacctaaatcttctgtttgggtataaaaaaatgtagctttgcggtgagcagccaatagattccctaattgtttaagataaagaagagtgtcagcctattaggccatgaaatggcaggggttactaaccagatgactgcatgacaattgttactatgagattcaaaaaacaaaaacaaaaaaacttcaaggaggacatggatcctactgaagctttatattagccatgtatgttactttctagataccaatgctctgaggtcttgctggcccctggagggattgctcctcccgggggcaaataacttgcttatgaacatgtttttcaaatacaaattgacaatccagagcctatacctcagccacctcctttattaggatctcacactccaggccactatctacctgccctagtaatcccagggcctggtaccacacaatcaggacagcccgtatgccccagagcctgctgaaatcttaaaactagcagatcttaaacctgcgtaccctgtctcagttgttcttttctgtagaaactataataaagtctcctgcccgcaggaaaattctctgcctataaccaactttggtgttttcttgagtggtctcctgtgatgtgtctgctctgtcctcttggaactgtgaaaagcaaactagcatttcaaaggcctgatttgttggccttactatacctcagattctccattgatacactatgttttagaggaaacctctagatattggagtcagacttcacttctctctggatattgaacaatttgtgtcttagtgattatgctgatggggcggctctgccactgatcattttatcatcactcaaacatgctctaggtggcctatgggaggttatatttttcaaagatagctacaacactgtgtttcatcccacatgctgttttgtataatgtgattttatagtcctcccacttgtttcctccccttgaatcttgtgattatggcagaagtgatgcaatatgacttctgaggttaggtcacagaaggtgatagagcttcacctggttcttttgcggaacgctcactctaggagcgcagctgccatggaagctcaagtagcccatagagatgaccacatggagaggagccaaggcttccagaccaccacgccggctgagctcccaaatagtaataattaaaaaaaatttgccagccatgtaagtgtgcctccttggaaatgaattctgcagtccccaggtggactgtcccagctgatgctgagtggagcagagatgaactgtccttgctgagccctgccaaaattgcagtcatgagctaaataaatgtttgctgttgttttaagccactgagctctggagggatagcttgttatgcagcaatatatagctggaaattggcttaatcacaaagcctccctaaaaggagcacatgctaaaatacacagcaggtttatggaacccggccacgtggccaggtctggggttgaggcagattttctaaaccaaacacccaccctagagattctgatttaattagtctgtggtgggacccaggtgattttaatgtattaatacaatcaggtaattctaatttgcctgcaccaagaacagttggtatagaaactgtgaggagttgggggacccaggcatctgcatgctttaagattctcaattggttcaaatgtatagccagggttaaggacactgtagctaaactatctataacgtgaatgtcagagcagtgcttttaaagctttaatgtatacctactcaccagcggatattgttaacaatgcaaattctgatttataaatctgaggtggggccccaggtctgcatttttatcaagtttccatgggatgtggatgctgctggtcccagtaccacatttggagcagctgggagttgaagcactatgcaagagctaaacagagatgtctgggtaaagtatccacagtggcttataacatctgcccaaaggcctcaaactggccctaatgcaagaagtagaatgaagtgcactaatgaggggtgtgggaactcagtggttgcatactcggaggattctgtgaatgagaaggctgtcttccggctcctgggcttagaattgattgaaaacattaccatcttaaagtggtactagggtggaacacctggtaatctgaatgagccatcttcctgttgatatcaccccggacacattctgttgcaacagggctttggggagttatacttcatgggtttggtggcccatatcaacctattatgaggcaagggctgttatgagccacagcaactgtttatctgcctgtgtaggctcttcaccagaaatctcactcaggagtggttgtcctgagaagctgaaagagagccacgttaagtttctaacagcatccaatgaatgacctccatttagttttgctccaagttatggattgggtggcaaattctttccataatcctgccaattccagagaaataaagatccagattaaagtgaataatgttctagaacagtcttggcacactatggcccacaggccaaatccggccttttgtatcgcttttatatggctaagactgatttttacattaaaaaaaattttatttttttctagcagcctcccaagccagagtagactcagacactccccatttttaaaggtttataaaaaattaaaacaaaaaccaaagatgaatattttacagtaactgtatatagcttatacaaactaaaatatttattacctggccctttataggcaaagttttctaatctctgctctagattaaaagcccaaatatcctttattaattgccttccctgccactaaaagaatatggatccctacacatatttttcagaagtaaataggaggtctacctccagggaatccagaataatccctgtaccaacatcatctgctatggtctgaatgtgtcctccaaaatttatatgttgtaacttaatcgccggtgtgatagtgttaaggtgggacatttagaaggtgattaagtcaggagggctcatggatccctcatgaataggattagtgcccttataaaaggcctgaagaaacataggtaggagcttttgcccttctgtctcttctgccatgtgaggacacagcattcatcccatccagaggacttgataacaaggccccatcttggaagcagagagagcatccctcgccagacaccaaacctgccagcaccttgatcttggacttcccagtcttcagaactatgagaaataaatttatattatttataaattacccagtctgtggtattttgctatagcatcacagatagacaaagatatgatctccaagtaatctagaaatagaggcctagaagagaagatttttattctttaattacagaggaagtgagaagagaacattttttcatcataatccaatcttgcatttctgatctttcatctattcacatttttactcctctattttgtagctcttgttctttccctcctattctcctgacatttcctcaattcagcgggttcagtttacttctcctatgctgaagaaatcatttctttaaggaggaaaaaagagacaaagggaaagtcctgaaaagtaaagggacccaagaaatcaactgtatcaatcaggataggctgctgtaacaaataatccccacattttcatggctcagcccatcatacgtttatttttggctcacacaagtgaaatgtcgatgcttccagttaggttgccctccttgtctaagcagtgtcttggagattcaggtttcttccagcttgaactctgccactctcaacacatgtccccaagggtcttcacagaagtggtggagatatcatgcagaagacaccccagattcttaaccacctaggctgggtggagacacatgtcacctgccctcacattccattggccaaaattagtcacatggctccacctaactgcaagggggtgtgggaaatgttgttcctggctggataaatctcatgatataatactatatgaaagaagccagcacaaaataagtacatttggtatgattccttttatatattcaaaagtatataaaatgaatgcattccattagaagcttaggtagtggttactgttaggtgaggtggtcatggggaggaacatgagggagcttcttggtttctagtgttcattttctggatcctgtctctgggaacatgggtgtgttcattttgtgaaaattcattgagctgtgcacatatgatttatgtacctgtgtgtttatatgttaaacttcatttaaaatttttacactaaatgctgatagtagacaggatgtttgggaaataaagggaaaaaccaacccttaagctcactttttgctctttttccaatagtaagatattgtatctcttaaactcagttttcttgtatgtaaaaaaaaaaaggttcataataattgctttgcttggcttttatgaggaacacaggaccctagagacacagtttagaatacagcagacaagagttctcagctactatagccaggacacgtttttattaggcatcttattgtggctttggttgggagaatactaatggctgctagacagaaaggaaggtgagaaagaggagaattaaaggtaatttgctttgcagaattttggctttgagaagtttagggttgattaagattatgaaaaggcacttataatctcagaggagagaaatatatagtacatagaaataatcactataagaaaaattataatgttacacatcatatttgcatttaacttatgtgaattcaactatacatatttggcacataccccaaccccacaaacacacccctcttgaagagaacatgaattagatgatgtgcatcatcatttcttaactcccactccactctccatgtgagacttctcagtgacaagtgtaattctacctcttaaagacacaattattttcttaccacacagctcctaaatgcatgctaatgactgtatgtcaatcacctatggccaggtggcagtggtgaaataggcatcgctctctgacgcacgtattaaaacttgcagaattggtagatgagagaaggtttatctttatagaaagtttccagttattaagtgagggagaattataggattggaatatcatcttttcacaactactaatgaactaatgaatctgggcattaaacatcaatggctgctaacatcacatgaagagacacccagacatgacatgcctcctggtagaagaatccaacattacctatgacgtgttcctgccaaaaaactcaaacccaactaagatcaaacctctcagttcaaattattcacatacacacacacacacaaaaataatttacataaaatataagggagaaaggaacattgtaaattacaccacagggttgaaatcaacaaaatccagacagtgacaaattccacatgggcaaacaaccctgtttcttcaacaaataaattgtaaggaaagaaagagagagaatgaaggggaaacttcagattaaaagaaaagtaaaagacatatcaataaaccatcatgtgtgggccttgtttgaattttcattttaaaaaatttaaaaaatatttataagataactgggactttgaacattgcttggatattttattacgttaaggaattatcaatcactttttttaggtttggaaagatattctggttatatttaaaataatcctatcttttaaagatatgcactgaaagacatggatgaatgatgtgacagacgtttcagacaaatggtatgtcagatgcttggttcaaaattatacaagaggggagaaagtgaatgatggtgtatgtgggtaggaatggctgtagctgatgatccggagtgtggttcattattcgtattctgttgcttttgtatttgctaaacattctgcataataaaaagtaaaagaaatggcttatataatggtgtcagtggcttggaagaaaattccatagacagcagcagtgcacacattttaagaagcatgatattatgtgtgctcttgccagaaaagacaatatctcacagtcactggtaccatggagttcaccgtgattcaggattaaactctaaatgtgaggaagtctttataaccccttaaataatttttcctgtatattttgcttttctaatgtatgagagtgacagatgacgtaaaaatgttgatatgaatctagttcatttaatagggacaaaatttaatcaatagggataaaaaaatatttttcattgggataaaaattccaactgatatgtttgcatcatgtctgaatgcaaattttttttttccttgagttgtacataaacagcagaatgtcttattattgataactttttagttttgatgaaatacaaaacttcttctagtggccatgttagcctcagtgatttactcaaatgcaggataagggaaaaaaactggatttactggatggattaacaaatggtcctgtgttattcttagtaatttaatagtttctgagggattctttttccagttgcagattggagtgtgtataatggtctgacttaaagtttggtcaagatgaagagggaggcgtgggaaagctgctgcggctggcagcatgggggcagtttttctgcagctgcttatcattttctgtcttgtttaaccatttaaaataggagaaaaaacatacaggaatgggggttgttgtcaataagggctccaattcggtaaaaataggctttgcagtggatgcatcagttgtgacagaaatatagcagcactgaactggctggtttcagaaatgaagtgcccataggagctggcaggaactgcagaggtcaccgaatccaccactgtcattttgtgggtgacgatgctcaggttatccaagtttacacagcaagcgggacccatggctagaaactgggtctcctggattctaagattttgatccatgctaaaagaaaatgctccgaaggtcgcctagaagcagagcctgagatggagattcttgtgaaagagatttgttgggggaacagctctcaggaaaaaggaaatgaaagggtcaggagagggcaggggaataaaagcaaaccaagggtgtggtttcaggtgtagaccagctgcggccttatcctcaggcaagagggccagccttctgaaccccctgtcagccatagctcttttgttatgagctgaactgtgcccacccctcttcatgagctgaagtcccaacccccagtactttagaatgcaactgtatttagagacgaggtctttaaagaggtaactaacctggatacccagaagatatatataaggttagcgtatgtctataatttatatctttaaagaaaaaaagacaagcattgtttgttctctaatgccaactctgaaactacaagaaggtctgcaccagaacaactcttctaagaatgacttagatcaacagtacaggttataaattagaagtgctggtggatggtttggtggattgttcagaaggtcatttaatccctgaacaactgacattcttttacaaaaatgaacaagacactactccttgttaggtgctgaactgagtctcccaaaactacttatgtggaaatccttacccctagtccttagaatttgactgtatatggagacaggatcttaaaatcctgtcctcattttaacttaactattatattaaagttaagtggaaatgatgacattagggtgggccctagtccaatatgatgagtgttctcacatgaaaagaaaatttagaataggcacacagaggcccagcatggtggctcacgcctgtaatcctaacaatttgggaagccaagatgggcagatcatttgaggtcacgagttcaagatcagcctggccaacatggtgaaaccttgtctctagtaaaaatacaaaaaaatgagctgggtgtggtggcatgtgcctgtaatcccagctacttggaggctgaggcacgagaatcacttgaacccaggaagtggaggttgcagtaagctgagatcacaccactgcactccggcctgggtgatagagtgagaccctgtctccaaaacaaaaaacaaacaaacaaacaaaaacaaaaaataggcacacagaaagaagaccatgtgaagatgcagagaaggctgttacctgcaagccacagagagaggcctctgaatgaaaccaactctgctgacaccttgatcttggactctcagactccagaactgtgaggaaataaatttctgttgtttaagccccacagccctcggtactttatgtcaacggagcagactcatgcacctttgaccaaggaaatcctctggagaaagaagcagctgtgcattgtgttatctaccaagactcccagcaagcaggggaaggatgccctgaattgtgaagggatctattctctaaggacatggaggaatacccagagatctcttaagaggtgctctattagaacttttagaaagcaacatttatttagaatgacccaactatgggtcattctcagaggatacaggggaagaagaagagattggattgctgtgattttatagcttgactttttatatttttttccaaagcaaacatgaaaggaagatggagtctgacatgaagcaggggaggaaaagaagactatggtttgtctttcttaattgggaaggatagcaggatctgctgggtagagaggggtgcaataaaaatgtgctacctcttctgagatcaccaaatgaagtatggattgcattatgagacaggctgcatttcctcattactctaatccagtcttcaccaacactttttaccagatttttactctttcctgcttttagaaattttatttagtttttatatttatttatttgagacaaggtctcactctgtcacacaggctggagtgcggtgtcattatctcatagctcactgcaaccttgaactcctgggctcaagcaattctctggactcaacctctcgagtagctgggactataggcatgcaacaccatgcccagctaatatctctctatgttgcccaggcaggtttccaactcctgagctcaagccatccttctgccttggcctcccaaagtgttgggattacatgcttgaaccactgcacccagccaagaaattttttaaaactcaaatgaaattattgcaggggtttatcaagttgattttcaccccaatcattttctgtacttaataaagtgaaagaaagatcactgatgaggaaatttctgtaggacacttgatgagcagggaagtaaaacataattcttaatagtcaggaagttggctccttcaaacctgtagtatgacttttatcagggaaatggaattcaatttctcaaatatttactcctttttactttccatgagctgtattaaacagctactaagcaagaaaatgcccttccatgatttggataccacatttttgggcaatatcacataaaccttggtgtgacaaggaagcctcaattgcccttttatcacaaggccatgataaaagagaaaatggttatgttacccgagtggggaagaatgctaagtgatgacaccaaacagagtcaagcttcctacgtgtgagtaaaacaggtggaaatctaagaccttgcctgtgtgcacagatgaaatagcagatgaaatgtaagtttaggggcccctcacttacataagcacttccaaggccccgcaccgaattttttatccatagaagttttgtattccttgtttctacaacggacccccacatagaatcatctccaggctcccataacctgcaacttcctcatattgggtataatgttgtcagaagaaatgattatggatgggacatttagatacgtgcctgtggggctccacagtgatcatgtgaaaagggacaatagtcagtaaatcacccagttggttgagtgcacaagacaaatgtctttcatcaatgatttcccaaagtgactcttgtatgaggccctccattagctggtccatgatacgcgtccatttgggcagctacgtggagatagcacaccataaaataattttatgagtacttcatctgtctgttgatcagtgtttctaaatggggacaattttgtcctccagttgacatttggcaatgtctgaagacttttttttcaattaaaataatgtttttttaagagacaggacctcactctgtagcccaggctggagtgcagttgtgcaatcataactcactgcagcctcaaactctgggacttaagcgatcctccagtctcagcctccagaggagttgggactacccatgatgccatcactgggctaattacaaattttttcatagagatggggtctcactatactgaccaggctaatctcaaacttctgggctcaagcaatcctcccgtgtcaaactcccaagttgctgggattacagatgtgagctactgtgcctggtctggagacatttttgatcatcataactgagaggatgttactgaaatctaatggatagaggccaggcatgctgctaaaccccctacaatgcacagaacagtcccccgtaacaataataatctggttccaaaagtcagtgatgccacagttgagaaactctgctctagacaatagaggttaagatcttggtatcagggtttatagatctaagtgcatgttcttcccctgctagatcttgaagactcggcttcctcatctgaaaacaaagaacatattggtatccatctcacaaggttgttaaaagggctttgtgaggtaatagaggtggaggtaagatgcttagcacagtacctagtagagagtaagtgcccataaagtgctgatcattattgctattattatatttatacccttatatacactgttttggaaggggaatttttaaattacttttatgtacagaaaactcaacagtgtacatttaattcagcttagtggcaaatctgtaccctttgccatttccagcttggcaatgtgagccatggattttgggcctgggacattgcttcccccgtgatgatggatctcatcatatttgttgttgtaattggtcttggtagcttccaccagcttagccaaaactcctttgtcttctaagttaacctgcatgaaggtgacaaaggcgcaggtcatcttgtggatcagacgtcccattcttgccttccttttgttaatgccgtaagggacccttgtctttcaacacaaggcaggtgggaagtgttttatatactctgaataataataaacctttactccttctaagggttaacctcttaagtactcagtttctctatctaaaataaaaagagggaatttggtcagtgatgtttaagtttggctcaaggaagtaaagagacttagtggcaatatctctttttcccctttcccagatatttcttcccaggggcgatgggagagcgggagccagtgagtgaagataggaatctccagctccaattcagataaatcaactcagcttttatctgttttacttttgctttgagtcaggctttaaaaaaaaaaaaccttaaaaaattattgaagtaaaagattcattccaacaaaacatttgacaatttaagatagtttcaacatctgtaagctgaaataaatatctgaagcatttgaataaggcataaaatattcaagacatctttttccatggaagtttaacaggttttcatgtgacacagaataaatccagacgcagaaagatctcattacaattgagtctggaagaggtgttctttggattttcccagtcttggccaaaatcttgagtcttatattcattcaggaaccacctcattcatctatctatgtataaacacacatgcaatggttcctcaacacatggatttgttgtctggggtgagaaatctgtgccttgcattaggcaaactttcgtatcaataaacagaaagtcctacattgggtcttgacacacatctacagtctttaaccgggggcggtcagagatgtgctctggggctgagctggatttcttgagccttttccatgatgctctggtctcacagtttgtgtgtcctggaagccatttgtgttgcttattttccatattggggttgtgcctgtagctccaggaaggactaactgcagaggctggctactctgtctctttggagggacaactgttctgcttgatgggctgcatcttctccatgtgcaatgttctaaagagccccttctcggaacagtcccctctgcctgaaaactgaatggaaaaagaaccatacattcatacagaacctgacaccacccaggcagctacattaaataccttcctagcaatgtttgcttagagtgtctttgtcgtggcctaatgcatcatgtctgcgggtggcctgcccttcataggtgcaggactggggcaagaatacaaatggaggccatcagcttatggtctacccccttctcttcttagccctgactccatctttgtgcatgtacacatggacacttcagcctacaagttcaagccccatccatattatgcgcaaaaagtcaccctgtggcctctctttgggcctaggggtgtgtaacttagcatggttacccttgagaggaaggctcaaggaaagaggtctgtgcagacgttggaaatgggttcagagctgtttggagaagaaattacagggtcccaaagcctgaatgaaggcacggggtctctggatgatcatgtctcctgagctctgcacacctccactttctgaggagggatatccctggaaaagggccagaacagagccttctaaagcacaaggtccagggcaagggatcctctttgctgggctcgaggatggttctgcattccaaaaatgagatcatgtgtacctattttctgctgtttacctaactcattcaataacaccacaatgaaatctttgttcttttttatgtctgtataacctgtcacgatatatatatgacagttaattttatgtgtaaacttgaccgggtcacaaggatctagatatatggtctaacatttttctgggtttgtctgtgagggtgtttctggatgagattagcatttgaatcagtaatctcagtaaagcagatggctctctccagtgtgagtaggcttcatccaacctgttggaggcctgaataggacaagaaggagaagtaagagagaatttgctctctctgcctgtcttcaagctgggacatggatcttctcttgccctttgactgggacttacaccctcagctctgctgatcctaggcctttatatttggactggaacttatcttctcgcttctcctggttctcgggccttcagactcagattggagctgcaggactgtctttcctgggtcttcagcttgcagacagcagatcatgggacttcttagcctccataattacttgagccaattcattatagtctatctctctctctctctctctttctctatcctattggttctgtttctctggagaaccctgtctaatacagtataggtgtaccataatttagccagccatttctcttaataaatattgactttgtgtccaagttgtagctatgaaaaatgctactataaatatgtctgcacatatcatgatgttatttccataggaaacatttccaggaaagcaactgctacaccaaaaatatataatttaaactctaatggatgctgccaaatggtcaacaaacatgtgaaaagataccaaatacaccaaatcctcagggagatgcaaattcagctaacaacaagacattacacctatcagatggaaaattgtaaggaagagctataacatcaatatcactctggggaaaagtatagtctcatgcatggctggtggaaatatgaagtgcccagtcttcctggaaggcagtttagagcttatttatagggtcacaaaaataaaacagaagttcctcttcttttcatatttctttccgtttctgtcaaactaatacatacatgatgacactatgaactcactccctcttagattattccctccacgcacagggaggagatcaggaaggctgaagaattatgggccttgtatgctttcagcaaatctcggggactcttagaaccttgtctcctggctgtggctgaagctgcctatcttggacacagcatgctgaagtggaagtgaggggctgttcaggaatgaatggagacccaccagtaagcactgtggaaagccccctttacttggtttagcgagttttctgttcagagacccccaaataggctgtctctaaagtctctatctggaaatgcagaaacccatgattcttttcctgaggactttccccagctaagaaatttctagccataatgtaatgaagacctgtgttttcctctgggtcaaacaggctgctgggagccttggcaccccacctcctggaaacactattgattttcagcatggttgataaaacagagagataaaaggcccaatttctctttttatgatggatatgaccaattagctataaatgtcaagtatccacaacttaattaattccagttcatttaactactgtaattagattttttccccaaacaaagcaacagtatgttttcgaaggtcatagactaatactatagtgaacaaggctgaaagacctgcactttggatggaaagtaactgatggctggctagtgcctgtggggaaatagaccacacaatatcaaaaataattggcaggctgattaatagagtttgttcgaaatatatacataatacatctttgattaatagcatcaatgagcatttgaacttaaacctttaaaatttttagacattttttaatttaatggaaagactagaaaaaaaatctgactggagtttgagtcagatggtccaacgagaaaccagaatcccaattagagaggaacgtctcttttgcttgagaaaagcaacttaaacagtcatattctattgtataaaccaagttctccaggggataatatgggtaggaagagatttaatccaggaagggttaactgtttgccttaaaaagtcaaaagcttcagaaagtttgaagagtttggtagtgggtgctggggttgggagaggtgtttggtgggtatttgaaggtaagagaaagggagacccaagctatgtggatggtggcagcaagaatctgcagaaggtgagaggacttccccaaggagtgagggtgtcaaataacttccatatgaagatgtctaataacttacacgtggagacgtctgttacttaattttgttttctgtgcttccttctgccaccatttccccaagagtccagttaaagtcttccaaatggaactggcttgtgacagtggtgcttagaggacaggaagaagcaggcttgcactgaagtatccagcctggactgaagttgtgtggcaggaagatggctgctgtgggcgccaggaggagctgggtggagtagcaagagtggagaagaaaaagcacacggaagaggggagcactccagtaaaaagaacggctctccagcaccttttaaagggaactggtcaggatctggatctctgttagtgcatagaatggggcacggggcacaggattttttcatatctttttaaattgactcattccctttcatttaccagttttcaaaatgatgcattagttcacttccatcctccaatggagtcccaggaattattataaactcatgtattagttaattctttttcaattattatgaatgcatatatttaaatgcacttgttacatttctttttatgttttgagacagagtctcgctctgtctcccaggctggagtgcagtggtgcgatcttgggtcactacaacctccgcctcccagattcaaccgattctcttgcctcagcctccccagtagctgggattacaggcatgtgccaccacgcccagctaatttttgtatttttagtagagatggggttttgccatgttggctaggctggtcttgaactgctggcctcaggtgatctgtccaccttggcctcccaaaatgttggcattatagatgtgagccactgtgcctggcccacttgttacatttcaaccttttgcagttattactttttttttttttttgagacaaggtctctatcacacaggctgtagtgcagtggcacaatcagggctctcggcagccttaaactcccaggctcaatcctcctgcctcagcctcctgagaagctgggattataagtgcatgccaccatgcttggctagttatctttaatagtgctcagattgtcctatctatggcctaaaggagcctcttcaagtttcacaagccatcttttattaataatacatagaaaaagggtaactgtaaaagcccagaagtctcaaggatattgaggcagcagacactttggttgtcttatttttctgtaaactgaaattctggctattttttaccagcatctcccttcaactctcttctttcaaaattagatcacttggacttcattcaaacatcttatcaattcaaaggaaatctatgactcagttttctttatgtgtatttattaagtgcctaccatgctcccaggctgtgctgggcaatgctcccttctctggggatttcgactttcatttactgatgttgtgttgtttgtgcaggcagtcacagcagtgacattctccacatgtagatcggaacatccaaatgagagctgatacatcagattaaattgggtgaggcatcaacagtaaaagccatgggaaaggtaatcagtcttcaatagtttgggtaaagctttcttcctgaaatggcttgctgtgattgatttataacggaacttcattcttgctgggagtttccaagcatgggtaattgggttcatggcccatgaccagagtggacaaatggagatgccactgttgatggcattgctggccatggtataactgtgatttaagtggtaacagctgagtagaatttcttctccttaactaccctagctttttataaatgtggccacctgagctgcattctgagctctcaagatgagtcacgttttggagttccagaaagcttttctccaaactcttcttggattttcaggaagtatatctgtctgccgtggtacccactttctcctatgatcagaggccatgatgtctttctgaggcagattagaagaatcaattcaaagctgttggagcacatgaggtctttagtgaagacaatgacttcctaccctaattttcttttatttctgtgacctgttcagtgtccaccacaatggccctgagtggagatgagagactgtttgaaacattctctctcatcattgatatagaaagtatagagtcagactagtttgaatattggctctagcacttgttaattgcataaactgggacattgtcttatgttgggctctttctaaagtagactcggagaaaaagttttgaaggcaagtcatttacttgggaagtgattctaagaaacactggtggctggatgtggtggctcatgcctgcaatcccagcactttgggaggctgaggtgggcggattacaaggtcaggagtttgagaccagcctgaccaacatggtgaaaccccgtctctactaaaaatacaaaaattagccgggactggttgcacgcacctataatcccagctacttgggaggctgaggcaggagaatcgcttgaacctgggaggtggaggttgcagtgagccgagattgcaccattgcactccagcctgggtgacagagtgagactctgtccaaaaaaaaaaaaaaaaaaaagaagcactggtatgggggtgtgtggaagtgagacaggaagggaaggaagcctatagagatgtgttaatgagccattcactcctgtggcaactggggctcactcctgttggggaactctgggaggccctggctcagtgttatcccatattgtaggagagaaagctggggtattcattcagtgacacccatccatgggggtgctgagcacccacccaggtgctttaactttccagcttttctattctgctgtgtgtgtgggctgggcttgtttttgaaaccagaaaaagccccaatcagagggtaacaggtgcttgtcataggaagcccctggcctggaggtagatgggaacatgtgaatggtgactctgttacacacatgttatgccacatctctaaaccttggtttccttgtgtgaaaaatggagataacgggagctacttcttggggtttttaggaagattcaaaagctaatgtgaagggaagaggcctagcatgtagcactcaaagtaggcacttcacatgtatttatttctttcatttttccatgtgaatacttcattgttataatagcaaataataatacaaacaggctctgttttacaggattgggtggcaggaggaagtgaggagggagcagtgggtggacactgggtgaagcattgtggatgaatagtagtaaaagcatcaggcacagtattgtatactcatccatggggactcttccatgtattcatacacaaagagaagatttctgcagtttcttcccaaagttttcccaatggcacccctttagtataatattcaacgtgtttcaaaagtgaaattgctgcctgggtttttaaaatagaatctttgctttgtgattaggcagcagaacatgggtaatttgtaccaacatatctcctttcattcttcaaaaatgaagtaccttctgtcattaactcaccacatcctgtgcttcctttcaggaaggaaaaaccttccatcaatgtatgagatggctcgcgctctccttgcttcctccatttcacagttggagagaccacgaccagaggtacattttggaaagaagtgtatgaacctctttctggaatatccaggttccggttacaacaactctagtcctcatgaaattgtactattcagggcctcccagaagaaaatgagaatgttgtactgtattctaaaattgggtggtgataaatgaattacacatggctttgaatctccttttggcaaggaagtgaggcagagcagcttgattgcattcgttgggaggtggggctgtgctatatcctttttgttctgttctgtttttattacatgtacatgtgggtctgtatgggtgtgtgtgtctgatgaatggccacagctagagaataactaggattagagacctagctaattatgtctttttttgttcttacctcaagattaatgtatgagtaaggattggctagcctatgccaaaataactgatagcccctaaatttctatagcttccaccaacaaaagttaattcttgctccttctacatgtccatcaagggtcagttgggaactaaactgtgcttctgtgtagttctccctgcagaactcaggctgaccaacagcctgtatctgggatgcttccagtaatgacagaagaatgaagctttggagggattcccagcaatgattaagtgctcaacatgcaggtgatatacatcacttgtgctcagagctcattgtccagaattggccatgtgttcccaatcaaccagaagagctttaagaagtgcaatgttaacaggtgcccaggagagaaagagaattagcatatgtggtgagcaccagtaatgaccaccacaatttgagttaaggttagacagcttagagtcctaatgacttttctgcttttatctagaaatactcccacttcaaagacatattgtcaccatattcaagatataaaatgtcaatcacttatatctagaccagcactgcccagtgaaactttctgtggtaatggaaatattctttgcattgtccaccgcagaacctactagccacatatagtcattgagctcttgaatgactatatttaggttagggtaagtgagaaactaacttttaaaatttttattcaacttcaattaatttagatttaaatagtcattattggccaatacagttctagatcactgaagtcacattgtggatttattttttgtccatcagcaataataacaatgtcacctatgcccttatatttgtactgcattctgtagttttcaaaatgcttttctatatacttctcatctcatttgattctcccaacatccctagagggtatacaaggcagttgatactgtaatgcccattttatagatataaaagcaaagatgcaaagacattaagtgatttgctcatgactgtgggacaattagtggtgtggggctagaaactaaaagtctaggctagttacgccctgtttgacattatacaccctgctcagcaccatgcttgtctcacaataaatatttgactcaacacttgaaaaatcccacaaacattaacacaaacttacatttctttcctttgaagcacttatttccataagcacttgcatagcacttatttttaatattactccatgttaaacatggactaggcttacatgaatcataccctttcttgaatataaactgtcagtatctgacagtttaatatatgaatttccttttctccaattaaatttccccagcgctccataaattctggaaattttcctctttggtaacttcttcagtgtccagtagggtcaccaactgtcccagtttgcctaagactgaggaatttcatgggatacagatgttcaataccaatgccaggacagttccaggcaaactgggacagttggtcacccaggtgcccagcacaaagctgtattcctggtttgaattgaatggaatattaaagttgcgaagatgtgtttcaatcacagcccttaacatagtcacttgagaattgcaggtactccataaataattttatgacaaaaatgaagggtaacaaattctggatatactttcttatgttcaaatagcaaactaagcaagtgaatttttttaaggaaccgtgtgatgtcagcacatctcttttcttatatttccatgtctagtttgaatgatatttctgttaagagtaaagaaaaattatgtattgctgatcttggatagagtaggccttaatagcaggagttcacagatgcatggctgtgcacgcacatccaaatacactgtcaaattatggacttctcaaaagcttccactgacttaagatagctattctaaagttcaaatgcctatttttaaactttctgatgctctctttcattccttgaaataaccacaaccttctgtgtctctggggaacatggccaagctcttgctgtgtggattttccaagcctccgctcttacaagcagggccagggctttgattttgatctgtggctttggggcggaggactcactccctattgtgtcttgagcctttgaatgcttcagtcactacagcatattgattttctcaacttcttcaaatgagaaagtgcctttggaatagcaataaggtagctctttacacacctcctgaataacaatctccttctgtatctgtgtgtagaatagccatgcctccttgactgtttgtcattacaacaggcagctttgctgtagttcacatcactgtcacctggcaaacttcatgatgccctcaggttgcccacactttacccaatagatatgtttttgaaaagctgagggttaaactaatttatgcaaatcaaatgcttctggtcatatatctgcgtggatgttgtaaaagagaactcatgcaaggtggagagggatccatccaagtgattcacccctctccccagcggctgagatcctgtgactctaggttcatttaattctatattttattgataattttagatatttttcattttcactcctgagtgatcttcaattagcaatcgttcctataattttatttttagtttagatttattcctagggtttagatttatttctagggcaatgcctagaagagggccacagttcgcaagggtgtcattcacacatacggatggaaataccttgagtgtattgcctgccatgaagttggtagaagcagaagcatcttccttgagtcttcttgacccattcttactgtctatgaacataaatatagatttggataagggaatgagaagaaaatcagggcacctttggcccaggccatgcacaaggtacagtcatagtggaatttgcaagcaaaatgggtccaaggagttgaaccgagaataaaatcaagaccaattaaagagaccacaggttttcagtttggcatttaagcatttgtaatcatcatgccaaccttcctttgagatcagtggatgtccagggtataccccaaactaaatgagccagaatcactggggtgggacccagatatcagtattttaaaaaattacccaggtgtgcaggcaagtctgagaatcacttctgagtaaaagatggtaaaatagtctcagtttctggagaaaaggccagcgtactctgtggtacagtggaaagactattggaaagactgtagagatagctgccagtaatgggattttcttttgggtttggtgctttatttctactcctcacaacaatggcatgagatagatattcacattaggtccaatttatgtaccttttcacatttcctcagtttcaaatttctctccctggagaatcatgctgccataaccattaacttatcttttgttaatccacgaatgtgttcttgccaactcatcaaggttgccctaccctgggcgtgtgaagatagtgtgttccacaccatggacttgggattgtgaccttaactctttgctgctgctgtgcatcctctgtgattgaatgactggctgtgtccttttgtggtctgctcattaattcacccccttgtatttgctctccttctatgcctctctcacttttttttcctcctcactcttacggccctgggattggaacccacagtaaaatgttaaaaggaatatttgtcacatgtttgatttttgaaagggcccaagctaagacagtattattatccaataaatactcatctgtcaatttccaaagtgcatatcctttttattattttccttctttgctttttattattttccttctttgctgccttctaggaaagagaactggatcctgacttctgctttgccactaacttgtaatataatcttatgcaagtcatttttcttccctaaacctcagttttctcatctataaaatgagaaggttagactctcagatagtctgaaatttttggattctatgattctatggacactttgaacagttgaatgaagcctatggatcttttttcacaattatgttttaaaatgcactgaaatacacttgttaagatattatataggtaagtgtatatcataaaatgttttctatttcaagctagacaacacctagcataaaatatttttggtatggtaatatatgtacttctttactcatatattaaatagccacttatttaataactatgataatgttctgtagtgatgagaataaatgatatttcaagatgacgataagaaagcagccctgaaagcagctaggctgtaatgatccagttgaaataaacaagactcacaaaatataaatgatgatcagataagttcactgtgtgaccataattacagaagataaagacaaggatactttctagagccacaaaacaccttcctcttacaatggacgcaagtgactgctgcttcttgatcagttacagccctcaccttgctttaataaaaattacctagatacccaatcactgaattatttctctttacagtacccagttcaaaacctgtccctgtcccactccttaagacctcctagaagcactcacaagaagcacagtcccacaagaatccttctctaactcctgcttgtcctgacatcccacggctcccctggcttggtctgcccttcagtgcagccatctaaatacaactaaacatttggaccatggttgtgttcctggtgggctttaatttctgcaacaaccataatgtgatgtgagaatacctgattgatttctaccaaggacaatataattgtggaggcgagattaaaatctaagcactccagctttagagattgaactcttaatcctctgtgctccccagcctctaggcatacaaaactttaaaaatacacaaaacataaataatcacaaccagtgatgaactattccatacacaacatccgtaaaggcatgcttgagttaggggagagatcttaattgggaccaaaataacaaccacaaaaaccagtcatggtagaaaaggaaataatgcagctatatcaataacaacaataacattttccatttgtatagtcctttctacattactgaaccctctgtatatgagtctcagcatagtgagggcagaccctccatccaggttttctggggcatagcctaagtcattcttttacctacaggatctaacgtaataattcccatagagagaagacggcttcttctcagctcattgttgaagcttcactatttagatttatattcagccaatatttactaagtgctattatggactaaattgtgtacccctcccctggcaacaaattcatatgttgaagccccaactcctgatatgtatttggaggaagagacaccaaggatgcacacatagagaaaaggccatgtgaggatacagcaagaaggtggccatctgcaagccaaggagagagaccttaggtgcaatcgatctgccagcatcttgatcttggacttccagatccaagcatttctcagaactatcaaaaatacatttccgttaagtcatccagtctggtagtttgttatggcagcacgagcaaactaatacaaatgactaatgaaagtgctaataattttacaagttacttctttgaactattgaaactgaccccgttttctcatagacagtttttgttgttgctgttgttgttgttgtttttggataagcatagaaattgatcctcctcgtcttaaacctgaaacttacaattacttgtcttgtctgagcttcttcctctggaaaccaaccctcatgcctcccagatggtatcaaggaactgaaactccttttccttaattcctgttttcccagacatttctgcattccttctctgctacataaatccccagttttagtcagttagggagatggatttgagagttatctcccatctcctcagctgcagcacaggaataaaaagccttcctccctgacaatactcgtgatctcagagactggctttctgtgtggcaagcaagcagacctagaccgaacccctggcattttggtaacaccactgcaaccagagtatagtcaaaccagtttctactggcttgtgagagccactttttaaatttaaaaaaaatttttaaaaatagagacagggtctcactgtgttgcccaggctgtccttaaactcctgggttcaagcgattcttcttcctcagcttcccaaaatgctaggattataggcatgagctaccacactcagccttttttaggaatcttgtgagctggtttttaaagcagccattaggaaaaaaactacctaaacttacaatcaagtaagttatattaaaaacaaaagtaaggctggcacagtggctcacgtctgtaatcccagaactttgggaggctgaggtgggtggatcacgaggtcaggagttcgagaccagcttggccaacatggtgaaaccctgcctctactaaaaataaaaaaattagctgggcatggtggtgcatgcctataatcctagctactcaggaggctgaggcagaagaatcgcttaaacccaggaggtagaggttgcagtgagctgagattgcaccactgcactccagtctggggaacagagtgagattctgtctcagaaaaaaaaaaaaaagtgataaatactcaaaactcaccacttcctaattgttttactacattttgtattttacatatttgtatttttatctatgtttatattttactacattttacattttttattctgcatgtgcttgaagttatttatgtctattgtgtctgaaatactacatagtgatgtgctactgtgcacctcttctcaactctgtgttcaataatatcgggtgagtggtttgaaacaggccatggtgggagtatttacaccatggaaatggacaaacagtacaaatcaggttttgttttgtgttgtttttccccagagagctattgttaaacacttacagcatgttcttgaccctaacaatctcacaagagagacggtgtaattccagatttacaaatgaggaaactccagccctaaaactcaagactcgggcgcaaactggggtctcttggctcctggactagggccttttgcatgataccacactgcctctccatgcatacatgaggaaatgctgttgctctatttatagctcagcctggctgcccagaagaatcagattaaaaggggcctatgcatttggtgagggtcttgccctgcctcttaaatttctctgcccagcacaggcgttgtgtcattctaataaccaataggatgaaggccacttgctataaattccagggcactgggaaaaagccatgggaggaacactcttttataaccacaatttgcagtctattataaagtactttaattgctactcagtgtacgatttttctgcgtgtttttccagcatggtgaaaattaataaggagaggggtgccgagtccaccctgctgggttgtgggaagcagaagccctgaccattcagagatggatttacagaagcaggaactgaagacaaagcaggaggtcttcaaaataactctcagagaagcttctttgatgagctgaggcaattcagcaacttcggcactgcgcactcgtgctcataaatcgccagtatttgcaggcgttgcaagatgtctcccaatatgcagttaaaaaaacattctcactgcagtagcactaaagatctactgccagttattttgcttcagtaccttgcatcttaagggacaatttgatttttgcagttgattattgggtgcacacaggtttaaaaaggctaaatattgaactactccaaaaagaatcttaggaaagtcatttccctattcgagaaacctttgaagactaaaatatgttctttaacctctgaaagtgagagagtctaaagctgatgtgaacctaggctgtgcacgtgaatctcctggagagttttagaaaacctcatgcctgtatccactaccctatagattctgatttcagtggcctggcctgggtatttggatttttaaagactctccaggagagtctcatgcacagtcaagttggaaattttgaaaccttgatactcaaagtatggtcgatctgtaggccagcagcatcagcatccctgagtacttgttaaaaatacggaatttcaccccagattcacggaatcaatctgtgttttaacaagatccccaggtgattcaatggtgcagccaaggttgagaccatctagaacctagaaaataatctgagaagctgtccttatgaaagacaccacgccgtcttccttatttccatttaaaggtggtttttgcctctccttccccatatctagttaggtatcaagttctgttgattttcctttcaaatcaaatctccctgtgtctcacaatgtccagaattccctaatgtcagggtatttgctgcagcagcctccaggcccccaaccccttccatctcccttgcaggttactgatagaataagtcctttaatttcctctgctcaatgacattcctggccccggtttcctacacatctcaaatgtgcatctctctctgtctgactccaaggccgtccctcacctggctcctggtgacctgtcgaacctgatttcccactgctttcctaatggttctctctggcttcagcctgtcttttcacccagacacaaggtgccagcccagacttctctctcttggctcctggaaagccatgtgctttcagtcttccatttgcctctccaaacctcattcatcctcccaggctgctttcttttgctttgatgcctccagtaattataatctgaacgattaattattagcttcacatcatattggtcatcaattttcatgcacatagaaccaagctgagcatgaagggctaaaacagaatgaaatgtagcgtggagatgaacccaggcactccctgttcaagataggcctggcctcttcaagaaggcaccctggttgtgaccacatctttctgcacttagggcaggcctagtggttttgcctcttccattggactcttggccttcaggttggtcttgtagcctctctggattaagtgttatcatcacatccagcagttgggtcctggtgctacctgtgggtagaccatcatgccacatggtggcagtgcagatggataagagaggcaggaagaatatgtaataatagcaatagtttaggggtttctacgtgccaagcacaattctgagtgtttcatatgtgattctttaatttttttaatttttaatttaattaattaatttatttttctgagacggagtctcgctgtgtcacccaggctggagtgcagtggcacaatctcggctcactgcaacctccgcctcccaggttcaagaaattctcctgcctcagcctcccaagttagctgggactataggcatgcatcactacacccagctaattttttgtatttttagtagagatggggtttcaccatgttggcccggctggtctcctgacctcaggtgatctgcctaccttggcctcccaaagtgttgggattacaggtgtgagccactgcacctggcttgattcttttattttaaaaagcccttttactataaaataaaacatagataccagaaaatcatgaagttttataaggcaatacctgtgcaaacagccagatcaagggacagaacctcactaagaaccctagcacctttctgatgcatcccatcctaatcagagtcccctatttcccttcccccaagaaacaaactcatcattttgattttttaaaaattatggtaaaacacataacaaaatttaccattttaaccattaccgagtgtacaattcagtgtcattaagtacattcacactattgtacaaccatcaacaccacccatccccaaaactgcttttatcatctcaaattgaaactcccattacccattacacaagaacgttccattcccctcccccacatacttagtaaccaccattctgtctactgtgtctatgaatttgactactctaggtacctcatctaagcagaattatatagtgtttatcctttttgtgactggcttattcacttagtatagtatctttaaggtccatctgtgttgtagcatgtgttagaatttctttctttataagactggataacattctattgtatgcacatggcccattctgtttgttcattcctctgtcagcggacacttgggttacttctaccttttgactgtcatgaataatgctgctgtgaacatggatgtccaaatatctactatgatttactatttatacttttatcatccaattttgcatctgcaaccaagcactttgtttggtcccaactcttccttaaaactgatattccttttaattcaattttaatcttcagttttttgtttttttttttttgagatggagtcttactctgttgcccaggctggagtgcagtggcacgatctcagttcaccacaacctctgcctcccgggttcaagtgattctcctgcctcagcttcccaagtaactgggactacaggcaggtgtcaccatgcccagctaatttttgtatttttagtagggacggggtttcactatgttggccaggctggttgcgaactcctgaccttatgatccacccgcctcggcctcctaatgtgctgggattacaggtgtgagccactgtgcccggcctaatcttcagttttaaaatgttatctctcatcctgacaagctgtacgcaataggactattactggtcccattatgcagacgaggacattgaggttgctcaaggccaccagaggagtgatgggtaaagctatgaaagacatatgctatgtctgagagacaaagcatatttagaaaaaagtcaaactatttcatctatattggagaatgtctgcatttggggacacgagaagaaggaagacagtgtcagagactaagaagaaatggacaataggctatgaggaccaggacagggtggcattgtgaacagtagattgtgtagtccttaaagttcaccatttatagtttatttactttggtccttagctagagtgggttaagttaaccacattctcaggtcacggaatgtatgtttgtatgaggccctcttgttttatgactttattctcttttacttctgcctccacttctacctccacttcaatctatcttcccttaattgctataattatctctgaaaatagccaaaacattgagaggttaatctggtaagtgaactgggtggctggtcaaaacaatgacattcattccaatactggataaattacctctttcagtgatggttagttgaaatccgaaatccttcttccactcatataacacatatttatagagcatcccctccatgccagaaatccttctaggcactcaagatttggcaggcagcaaggtagacacgatgcttgttcccatggacctatgttgttttggagctatgtgatgaaattataaatggatatatcaacagaagaaattcagaagaaaattaaaacaggtagaaaacaaagcaggaggttgtgactgggttggggtgcacgtaactttagacagcatggtcagagaaaggctctcggaggtggtgacatttgaactgagacccaaatggcaagaaagaaccatcatggttctttcaagccccccaaaaaaataggtttgaagcagaaatattagcaagttcagatgtcttgagatgacagaagaggcccactcaaggaacagaaaggttagtctcactggaacaggctaaatagatgtcagaaacagacacttataaggatgacatgtttactgcaccattgtttacatgttaagtgatgaggaatgggcagttggttttatcatttcaactcagaatgaagactatgatgttttcaaagagaagtgaggctgggcactgtggctcatgcctgtaatcccagcactctgggaggccaaggtgggtggatcacttgaggtcaggagtttgagaccagactggtgaaaccctgtctctaataaaaatgcaaaaattagctgggcatggtggcgggtgcctgtaatcccagctactcaggaggctgaggcaggagaatcgcttgaacctgggaggctctgcagtgtcacgatctcagctcgctgcactccagcctggtgacagagagagactctgtctcaaacaaacaaacaaaacaaaacaaagagaaatgattatgtttgacaatgaaggtctttaaagttttatttctgagcagaataaaatggagagtaatttttcaagtagactttcccccttcattctttagagaaattaatgctgctcagtgatgttgctatggtcaaaaaataaatagggaagtcagtgtgatatgacttggattgagattgacttgctttctatacagactatgcaagtagttgagcacacagtcaatagactgacctcctcatataagtgtgtgttgtctcttgaggcctgctttgtggctaatttcgtatgatttggctattatacttcttgaattcaaaaaacaggattgatattgtttggctctgtgtccccactcaaatctcatcttgaattcccatgtgttgtgggagggacccagtgggaggtaattgaatcatgggggcaggtctttcccatgctgttcttgtgatagtgaataagtctcacaagatctggtggctttataagatggagtttccctgcacaagctcattctctttttgcctgctgccatccacctaagacgggacttgctcttccttgccttctgccatgattgggaggcttcctcagccatgtgtaactgtaagtccaattaaatctctttcttttgtaaattgcccagtctcaggtacgtctttatcagcagcatgaagatggactaatacagtaaattggtaccagtagagtggggtgttgctgaaaagatacctgaaaatgtgggagtgactttggaactgggtaacaggctgaggttggaacagtctgaaagggcttcgaagaagatagaaaaaatgtggtaaagtttggaacttcctagagacttgttgaatggctttgcccaaaatgctgatagtgatatggacaataagatccaggctgaggtggtctcagatggagatgaggaacttgttgggaactggagcaaaggtgactcttgttatattttggcaaggagactggcgggattttgcccctgccctagagatttgtggaactttgaacttgagagagatgatttagggtatctggcagaagaaatttctaagctgcaaagcattgaagaggtgatttgggtgcttttaaaagcattcagtttaaaaagggcaacagagcataaaagtttgaaaaattttcagcctgacaatgccatagaaaagaaaattcaattttctgaggagaaattcacgctggctatagaaatttgcataagtaacaaggaactgaatgttaatccccaagacaatggggaaaatgtctccagggcatgtcagagacatgcacagcagcccctcacatcacaggcctggaggcttaggaggaaaaagtgatttcatggaccaggcccagggtccttgtgcagtgtgcagcctagggacttggtgccctgcatcccagctgctccagctatggctgaaaggggccaacatagagcgtgggccatggcttcagaggatgcaagccccaaaccttggcagcttccacatggtgttgagcctgtgggtgcacagaagtcaagagtggggtttgggaacctctgcctagatttcagatgatgtctgaaaactcctggatgtccaggcagaagtttgctgcaggggtggggttctcatggagaacctctgctagggcagcatggaaggcaaatttggggtcagagctccccgcacagagtccctactggggaaccacctagtggagctatgagaagagggccactgtcctccagaccctagaatggtagatccactgacagcttgcactatgcacctggaaaagctacagacactcaatgccagcccatgaaagcagccgggagggaggctgtacccttcaaagccacaggggtggagctgcccgagaccattggaacccacctcttgcatcagtgtgacctgaatgtgagacatagagtcaaaagagatcattttggagctttaagatttgactgccctgctggatttcagacttgcatggggcctgtagcccctttgttttggccaatttctcacatttggcattccaatgtctgtacctcccttgtatctaggaagtaactaacttgcttttgattatacaggctcataggtggaagggacttgccttgtctcagatcagacttttgactgtggactgttgagttaaagctgaaatgagttaagactttgcgggactgttgggaaggcatgatttgttttaaaatgtgaggacatgagatttgggaggggcagcatggaataatatggtttggctctgtgtccccactcaaatctcttcttgaattcccgtgtgttgtggaagggactcagtgggaggtaattgaatcatgggggcaggtctttcccatgctgttcttgtgatagtgaataaatctcacaagatatgatggcattataaggtggagtttccctacacaagctcattctctcttcacctgctgctatccatgtaagatgggacttgctcctccttgccttccaccatgattgtgaggtttccccagtcatgtggaactgtaagtccgtttaaactctttcttttgtaaattgcccagtctcaggtatgtctttatcagcagtgtgaaaatggactactggctgggtgcggtggctcacgcctgtaatcccagcactttgggagccaaggcaggcagatcacgaggtcaggagatcgagaccacggtgaaatcccatctctactaaaaaatacaaaaaaattagccaggcgtggtggcaggcacctgtagtcccagctactcaggaggctgaggcaggagaatgtcgtgaacccaggaggcggagcttgcagtgagtcgagattacaccactgcactccagcctgggcaacagagcaagactccgtctcaaaaaaacaaaaaaaaaaaaaacaaacaaaaaaaagaaaacggactactaactaatacatgcataaatattatattaaaacattgtgattaaaaccatttcacttggacacaatctcacttttgtggcaggcctcccataaatacttaatgactctcatcaaaggaaaacacaaatcaagtgacaagcagccagtactcttcaaaatggcaagattatgaagaacaaagaaaggctaaggagctgttccagattaaagggaattaaagaaaattatcaagtgtatgcaacatttgatctgcgatggcagggtgtgctgtcttctggacatgagtaatttccactacccattttggttaccaccccctgagtatgttcctgcctctctcctccaggtgccagattcagttcctctgcttggactaagtcagtcctgttgagctccctctagccctgcacagaggtggaaggggaggaggagtcacctctttggcttgtcttggtggtagtttcccaaccagtgattcaggtgcttacatacccagatcctcccgtactcccagttttgctagttctgggctggaagcacccccgaagacaccctacattttacagcagtcctctcttatatgggcttttgctttctatgctacaatcccaccgtagtagcaagcgtactcctacagtttggatgcttgtcccctccaaacctcatattaaaatttgatctccaatgttggaagtgtttgggtcatgggggtggctcccttatgaatagattatgccttctgtccctctgggtgactcctcactctatcaatttccacaagagcaggttgttaatcctttttctcacttgtttcctctattgctttgagtggaaccagcgcacatcactcccctttgccttctgccatgagtgggagcagcctgtggccctcaccagaagcaggtgctggcaccatgcttctgctaagctaaataaacctcttttctttataaattacccgcctcagatcttcctttctagcaacacaaaatggactaacagctaccaaaaacaccttttcttcttttctaatctaattacatatttgtttccaaataaatatctctcttgcaatgtctgagattttgcagtgagaaggagaagttacagaatattctcaggagtctatctcttcagaacagacttgcaaagtgttttctttcaagttttcttgccccaaagtacaggaaatagtgctgaatctattcattactaggagttatctttatattctatcaaggttatatttcagctccttgaaagcctattgtattatagagttgctcttgttaaaagagaaatctttgaaggatgccaagggttatcttggcaggaatccatggtaaacagagctctggctctaagagatcacaatatgcatcctcctggatagatggtcctgtaagaggaggcacaattctgcatttggtagcataatgtgcatgtgtgtgtgggcttttatttgcaattttttgttaattagtgaagaactattggccaatatttggaattaaattatgaataagtgtaaatgagaacttgtgtccatcacatgaggaagattctcctagggatgaacagataaaatataatttctgcctttattcaaaaaaaacagcaaattcagcattaaagttctgctctgtggtatgtaaagtttaggtttcaaagaagccacaagccatttcctgtggctagcaacagagcactctcttctcttgaactcacttgttctatgctcatcattcattcttatgttcattggattagctaacttttgctttgcaatgaactactccaactatcaaagacttaaaagaatggccattgatttagcctaagagtgggctgggcagttccctgtctggactggggttggctgatctcagctgggcccactcatgcatctgcagtcagttggtgagttggccaaggctaatggctgaagtggcaggggcaactgctccaactggcccacctgtctgtcgctagcctggactccatgtggggactgggctccaacggcagccagaaagtatgccccagatcctaagcacactgaggcctcagctagcttcatctcattaatgtccccttggtcaaagcaagtcagaaggtgaagaatatgttcaaacagtgagggagggaaagaatttgtggccattttgcaactaccaagccacattttcgttaattttttttttttaagatggaatctcactttgtctctcaggctggaatgcagtggcaccatcttggcctactgcaacctccgcctcctggatttaagtgatcctcccacctcaggctcccaagtagcgggattacaagtgtgcaccaccatgcccagctaattgctgtatttttagtacagacggggtttcaccatgttggccaggcttgtctcaaactcctgacctcaagtgatttgcctgcctcagcctcacaaagtgctgggattatagatgtgagctaccatgccctacctagttaattctatcaatgtggtttatctatccacctggacagatttctacacagagttgaaagtattaaagaaaatacataatgggaaaataacataaattacatagtaatttcttattatgaagcaacatgagattagataagaaactgagttctaaccacagtccattttgtagcaatgtgactttgagcaaataatttaggttgggagttagtgttttttacctttagagtgaggaagttggtttatctctgaggtttctcttggattaccaagatgttggattatctctgagcctcctcttatcactccattattagtagaaagaaatttgatatgagatggataaaagaaagcagctttatcctgaagaatttaccaacaaaatttgtttaaatccaacaaaaatacaggaatttctagcccaagaatatgagctctaagtattcccagatttggactttgagtatttaatctccagagaacttttgtcttctcccaaaacttctcctacctgtccactcagtctttgaccaaatgttcaggtttactatgaagcgctgacacagagggattggggcttcacatccttgccttgccatgttgttctcctgacttccccccactaaaagtttgacctcactgaggcagactgcagtcttcttgttcctagtagttagtagagtgttacatatcaataatcactagacactagctgaatgaatggactacaattgagctgatttttcatgaatagcagaggactatgtttctttgaggactgtaacagtatatttttggaacactggaaaacagtggaggctgcacttagagctagagttagtggttttctactttaagcaaagtgatttaatttgctttggctgtgaagaggggatgcaggggcgctgtaaggtggtggatgcctcacctcctctagaaggcaaatcagagatcctgtgctgcttggaatagaagaaggcagtgaggaagtgaaagttcagccacctctggggcaacagtgatctagagggctcaaggcacttgaatgggggacactctaaggtcaaacttagacctggtgccacctttcccagaagcggggaggccagaccattaacgcagccctattgggctccatatcctgctctagcccacctttcatgaacagagtgagctccaggagggaaacagagaggaaaacagctccatcatgagcacccttgaaaaccagcacttggataatcacatcagcagctgatcgcagactgtttttaatcattgactttccattgagcgtctgtcgttatacggtcctgggttttggctgagattatctctgaagaaaaaagatgaaaagaagcaaatccatattggactacggaatttcttccatttaccataaataagcaataataacaacaatgataaagaatattaaatagcaaagaaaaaagtccttgtcattttatggattcacaatagaactactacatttactataagatattatattgattaactcagtgatatgatactagaaatcagtcttgcaggggaaaaaatctgatttagaaaaaattatattagagattcatgttcattttaaacctcaaagtgtgactggtaatgaaaaattgaggccctatgcttctgattaaaactgatttagaggtggccttgcctgaagcctagaaaattcagtagaaaaatctctaagatctctctaatgtggtttttctccaattaattaattaacccttaattattccacataatgctcctgtgatggaggaaactggtgaagttactgccgtcttaatgagaaggaacacgaggcaatgggatgtgaaatgatctctggagtcacagagggagccgacactgaactcaggagagaatgcagaaagctgggaatcttcctcttctgtgcaaagaggggtttctcacaaataagcagactactgcttttcattctccatcagagtcagcctccttaatttaaagcaggaggaagttaaactctgcacccagttatctgcaggctttcaagacaagaagctatgacgcaatatagtacctgcatttccaaatcttgaatattacaaagagtttcagaaaaagagaaaaacatggttatatataaacatacaataatcttcatcttaagactggctgcatctgaactgtttatttttctgtcttccaaaaggatccagaaattttaaactgggaacatattttcaaagcacagtacaggcaaggcattgtgattgctcacaaatattcctttttaaacgtttaaaaatggttcttccaaacagttttgagagattgaactaaatgagtgttttagtggctacaaaacacttctgggtcctaaagcactttatttcaagattaagaagactcagagaaaatataatcagaataaattctgaaaactggaaggagtaggtgctcttaataagcgggcagatagactgtgaaatcctatctgaagagcaggaacaacaggcttctgcaacgtggtcctcattcaaattcatggaagaataaatcaacagcatttgaagtgcctcagagcaaggatgaacgtgacaagcacggaagggctcactggaggcatgaattcagctttgtgtggcagggttgccgaaatccagtttatttacttttgaaccattcagaagaaaccattaagaggggtaaaaaaggaagaaaaacagaatataagcagatatttcctttttaattttttttaacatgcactctgggtgactggacacagttgcttccgttggtccataaaagccatcattgtattatagctggtgggttgttggatgacaaacaacaggagcagattgcctcagtggagttcctcccctgcacgcaatggtagtcagggtttagaccttgagagcttcccctttttgtgaacattgcttgggaaaaaaagccttccagccccgacttagagggatgaagttcaaatccatgatattggtagaggaatcaaattgtcttcccagctgttatggactaaattgtgtcaaattcacatgtggaagccctaacccccagtgctttagaatgtgactgtgtttggagatggggcctttaaagatgtaattaagttaaaatgaggccattagcataggccctgatgcaaccaggctgctgtccatataagaacaggagagtaagacactcctggagagaccaagggtgcacatggaggaaaggccccttgaggacacagtgagatggcagctgtctgcaagcccaggaggaggcttcagaagaaaccaaacctgccaacagctggatcctgtccatccagacttcaaagctgtgagaaaataaatttttgttgcttgagccacccagtctgtggtattttgttaaggcagccctggtgagctagaagatcagctttggacctagtgctgttcagtgctcatctggaattgagtagactttctatgtccagacatgcaacggcagttcagtgatacgtgttgagtgaatgaatggatgatcttccttttcacactttccttatttttggaaacaggcctagttgtaatatctccatcacagggttgtagtcggaagtacctgtaaaatgcttagcgcatccactggtgcacggtcacaccataacagtatttgttccaatgatttttactattaagctttatattcatttttagcttttagtggtgttatagacagtgattcttaagctaggcagtgggacacattcatgagcaccatgagtattttacttcctgcagtttcaacagaacttgggctatttttctctaatgtactgaatttggtttgtggaccagaaaatcataggaattagaaacggatgggacaggccccatcacactgggcttatcttttaatggttggattaggtggttttatgactctttggtgttttatatcaggggtgggaatggagggtggaaggaacaaaccgatgttcttcccttttctcagtttcccacttctgaagtcccagcaaacacatcggactcaaagcaggcagagcttgggcctaaactgcactttagggtgaagggagcatggaaggctatgttcctcaggtataatgagtgataggacttccataatttgtgtcttaataactcttccactatggactagattttacttctctggtcgaaaattttcttagctttattcaattaccttcagttagtccccttttctcagaaataatcttccacggtaaaaacccccaaataaagtgcatagagctaacttttgtgctctctgtacttcgtgattattgagccagccttctgcatgctgcattaatctctcaaaccagcctcagacttgggctgcaaggaaagtgtttccaattttaacctgtctgcattccataaggctttgtttatgaaactgacactgtcccagagggccccacggcccttcagtgtcccttgcgtaaattccatttcatcactgtgttattattaatttgaggcttctcattgttgattacttatgcatttgccctcatcttggaacccctgtaggtggggagctgtggacagtccgcctggtgtcctttgtgcttcttgtaacctgtactcctgcatgagcagagcatgctccataacgagctgatcggatgggagcagctggccacacgtccattttcaccttccatcagtctgcgcatccatattgtctcttttttattttctctccttgattatgttttttctgagctgtgtagtgtagcacttcgagattgacaagtatgccatcaagaaagcaggcagagagggagaatgtcttaaatttttaattttgaaatgctctgcaccaccagaaacagcaaacagggcaggttcggcaatttgggggtggaaaacagcacacagaggatgcatgagctcacagcagcagctgcgataaggagggttaagacagatgccaatgagagaagagaaatacaggcacttttcccagccaactgtcagccctgaaagcaaatggtgccagcccagaaggccgctgacaagggaagaaagagagaaaagggcctcatgcaagagaagatgaggaagaaatctagaaaatgtggttatagcagcagccttccagtctctcattcttctgtaaaggatgctctgccctgccacacacatgggggatggtcagctccagcacagcggggtggttcgccccagagccccctccctagtgactggaatttcctccagtggcctaaaatgaaagaatttttctctagtcttttttcagtgggattttaatagacgcttagaaccatattagagcgaaagggtgtttggggattttacagcgtgcagtagtagcatgcagagacctgagcatgagggttgcctacttcgtcccacagcttgccattttttgtgtttgttttctagcgaactttttattaagtataacatactcagataaaatgcacaaatgataaatatacagatcagcgtcttttccacagagcgaacacatcatatccctgcaaccagaacccagattaagaactccacattcccgtcggcccagaagccctcattgaatactgctccttttctttcccagcaaggataaccactaccctgatttctaataagatagattagtttcaccagtttttgaaatgtatataaatgaaaccatacagtaaggccaattttggcttctttcactcaacattatgcttgtgagattcatccaggctgtttgtgtgtagaaatagtctgttcatttttgttattgtcttatactctactgtatgaacgacctacatttaatgtttatccattatactgttgatggacctatgagtaatttccagtttggggctattatgaatattgctcagaacattctagtgcttatttttgttgtttttccatgtgcctgtgcatttctgatgagtatttaacttaaagtggagtttctgagacataaaatatacctatgttcagctttctttttttttttttttttgaggtggaattttgctcttgtcacccagtggagagcaatggcgtgatctcggctcactgcaacctctgcctcctgggttcaagtgattctcctgcgtcagcttcccgagtacctgggattacaggcaaccaccaccatgcccagctaatttttgtatttttagtagagacaacatttcaccattttggccaggctggtctcaaactcctgaccgcaaatgatccacccatcttggtctcccaaagtgctgggattacaggcgtgagccaccacacccagccgtatgttcagctttcatagataaatgtaaatagttttacacagtggttgtaaaaatttgcacttccatcaacaattgtcttcctcattttagccattccgaaagatgtgatacagtttgcttttgagattcaaataactgaggaatttttttccttagtggaaacatccaatgagctggttgatatatgtgcctcttgttctgctgcttgctgccagggcaacctgtaggactctatctgcctggaaataattaatgcctaaaatggaatgatataaaaaaatatgaagcaaggactctgacctcaaagagctcacactcaacttggaaagatagtaactctacacacgacactagcaggccacaatgaagtactgaagtgtttgggagtactgttaaacgtttgcttaatgtttctgaaatgttggtactaagggtaaaatgcaaacagtggaatcagtccccgagtacaaagaaatgagagatggcagaacattggcactgggaaaagcctcaagaaagaaatggaactttgctgagctgtttgagtgtaagatgaagaaaactgaaatatttcaaaacatttttttgtcatgcacattgctatgtatatgacactgagcaaatatcttaatattgacaatggcctaaattgctggctttgtcacttaacatcagaaatacaagttacattgaatgtttcagaacctcttgaagtttctaatcatcctcttacctcttacattagctgtaactttagtgattatgtcaagagagtgaattgtgctttgaaattaggggaggttgaaaacatggtttgtgtgctgtcaactgtttagggtggagaaatggattctacaaaatctgcttcccacctctgatttcaaaatattgaagtaaatttcacatttcttgtaggcaattaaaaaggacaaatgttgaaattatatatcactagaaaggtctttatgatccatgtaacttggtgggtaaatattttaaaaatctcttaagtagtaaatttgacagagagggcttcttgcttccaaatattaatttttactcttcgccttcagatagcaaaatcttgggcaacatctcctgccaagaaactacatttcctggcctttttgttttttaaacttggtgagcccatgtaactgagttctagccaaagtaatacagatggaagtatagttttgaagcctacctaaaagagtgggggctaggcacagtggctcacacctgtaatcccaacattttgggaggctgaggcaagaggattgcttcaggccaggagtttgagactagcctgggcaacagaaggagacctcgtctctacaaaacagaaaaagaaatacaaaaattagctggacatggtggcatacgcctgtagtcctagctacttgggaggctgaggaggaacacctgagcccaggagttcaaggctgcagtgagctattattgcagcctcggtgacagagcaagaccctgtttctaaaaaaaagaaaaaaaaaaaagacagtgggcaaagccattctccttccttcctgcctggaacttcagcagccatttgggactgtgaagtcaccttttgaatgaaagcagaaaaatagaccaagaaaataaaacggaaaagtagaagttctctcagtccatgaagactttgtggaacagccttgaactgctgatcttcaggtgtcttttacataataatcctttgtgagtttcagccactgcaaatgagtctctgttgctagtagttgaacacagctccccactgatgtagatggatagaaatgtagaatccatactttctcgatctaaagattaagaagtccatggattctgatggcgttttcttcttcacgggatccccagtggagagggatgtgcagtctacctctgtgcttggcttcctccactatttgtgactgtaactatcaggcttgtccagtttattccccttcccttcagttctgggttgatcgcaagactgtggggaaaataagatgtattaatgtctctcttcacataaaaactgcagactctgttatggcctgtatatcagaggcatccatggaacaaaaggctcgaggcaccttgaggaaagtcatggtgacccccacccatgaagaagtgtgaaaaagccattcctctagaaagcccatgaaacagatgatattttctaaaagtggctataagaatatctctggtcccacgcaaacttccagaaatgttctacttccctcatcaagactagaatctacgtcccctccctttcaacctaggaaggtctttgtgactatctcaattaatagaagacagcagaggagatactacatgactttcaagactgggtcataaaagacaatacaacttctgcctagctctgtgtctaggaacaggtatgtttctaaccctgtaagaagcctgctaccataaagtcaccatactagaaagaccacacagaagtaaagatgcccatgaaattcaactgctccaatctgtttaaatattgatggctcagataccaaacataggagtgaggaagtcaagatgatcctaaccccagccactgtctgacatgagagatcctgagcaccaaccacctagctgagcccagtcaaccttcagaactatggtcaggtgtggtggcttatgcctgtaatcccagcactgtaggaggccgatggggagaatgcttgagcccaggtgtttgagaccagcctgggcaacatgatgagactccgtctctacaaaaaattaagaaaattagccaggtgtgatggtgtgtgcctgtggtcccagctactcaggaagctaaggttggagtttcctttgatcccaggaggtcaaggctgcagtgagccatgattacgctactgcgctctagcctgggtgacagagggaggccctgtatcaaaaaaaaaaaaagaagaagaagaaaaaaaccaaaactcccagaacaatgaaagataatataaaatgattattataattttgaatcactgatttttaagatgatttgttcacagcaatgtaaaactagatcagcccaacaagctgaatgccaggtctctgagatgccatttcttcctgccctacatctatgcttagatacctgcagaggtgtctctggtaggtggtccttcccagttcacctgaacacctccagtaacagagattcactatccttgggaagcctggataattttttatcttctctaaaagctgaaattctgtctccctctggcatccacctcttgttcttagctcagaggtgtgggcccattcagagcaagccagattcctcctccacaagcaatcttgaaactacttaaagacatctttcttgcttcttgtgggtttttgcttctttaaatactaagtatgcttttttatgtcattaatctcttcgtgagcacccctgaggagctaagagtgagagaaaatggtatgaaacaaaaagctttttgtgcaaagaaatctccagatttctagatgtaatagaaggtgaaaaggcaagatgtgaaattatgtattcactagaattataattatgtaaaataaacctatgaaataggcttcaaggaaatatccccaatagaaatatttaactgaaagtgtgatttgctgcctgattttcgaaactttttataccattgttaaattacttacatataatgcatttgagatcttctgaagagggaaaggatgcttttcagcctagggaaggtgaagacactaatgaagtctttcatttcatccaggctttccaggcttgccaaagtgtgccacacttactctcaagggcttttaccacatctacaaagaaacaaaatgagtgtatttagtgcccttgctcaaggtcagtcaagctgacctatcaggtgactgcccacaagtcagtttatccaaacaagtaaaccaaattcactgttccaagaccatccgatttttctctcccttttctcctttctcttataaatcctgtatttgccttggttcattggacgtctatggattatcttccttgtaagaataaaatttgcaagcaaaaaactaaaaatctctttttaaaaaaaatataaaaagaaaagcaaaccttcaatgactcccccttttttaaaaaaattattttactttaagttctgggatacatgtgcagaatgtgcatgtttgttacataggtatatgaatgccatggtggtttactgaacctatcaacccatcatctagattttaagccccacatgcattaggtatttgtcctaatgctctcccttcccttaccccccaccccccgataggccctagtgtgtgatgttcctctccctgtgtccatgtgttctcattgttcaactcccacttatgagtgagaacatgtggtgtttggttttccgtttctgtgttagtttgctgagaatgatggcttccagcttcatccatgtccctgcaaaggacacggaactcacacttttgtatggctgccatgactctccattttataacatcaaaaacagaagctgctcactactatttattcaagttcatttcacatttctttccgactctaacattctggcaaagtttattcatttgtcccctgaatgtgaccgacaaattcttatttgtctctatccgtcctcaacatgcctgtgtggttttctttaatgattcaagctcaaattccttctgtatgtgtgtgtatataaatttataagccaagacttgacagtccatgaacagaagtgtcactacccattcaactgtttgattgtaaaatatcacatactctgttcaaagggcccctttcattgctatcgggtagaaccaaagctttgctattgggatttatgtgatgtgagagcaggaaggaaccttgaagagaccattcagagcagccactcattttataaataaaggcctcaaggcccagagccggtaagttaattgttcaactcacacaattagtagcatgaaacagggccttgagttcagtgctgtgctgggacagcttgttctagcttgagactcagttttcaagttttcagcaattttttcagccagctggggtatttacaccatagaaattggcagactaaaaattggggcattcttctcttctcctatccctggagagctggttgtcgagcatttatcagcacatcattgaccttgattttttctccattttcttgagaggttgaatggaggtcccttgggtccctcttttttctctgtcatagtagccagttatcctgcgcttgcttgtcactcagcagggtacagtttccaaaacatccaggctcacctatccatctgtctgcttcccatctccacctggatatcttacagtcaactgaaacttaagctatccaaaataaaacacctgattacctaccagccgcctctagcctgccgctgccccaacactatccattactattccccaggtatttgctttggaaacctggaaggtgcctcttgattattcctcccttttccttatgttttgtgttgaattgtgcccccgcacccctcctaaaataggtaactgtgactgtgacattattaggaaatagggtcttcgcagatggaatttgatgtaaattgagttaattctggagtatgatgaggctttaatccaatgtgactagtgtccttataagaagggaagagacacagaaagagatacacatgtaatgacagaagcagagaccagtgtgatgtatctataagccaagagatgccaaagattgacagcaatcatcagaagccaagagaaaggcaccgaacagattctccctagagctttcagagagagcatgatcctgctgacaccttgatttcagacttctggcctccagagctaagagaataaatttctgttattttaagccacccagtttgtggtagctagatatagcagccccaggaaataaatacaccttccaaccctcaccccctccatgttcaatccatcagcaaggctttgaatcatgtctctaaatagaactgggatctatctacttctctgctgccactttaattcaggccaccttcatctctaccttggacactgccaccatttcttcactagcctagacttgacccctccattccattcagaaagatccacacatagcattatatcatgtcttctcctgcttagaagtctgatttctattgctcttagcataaccctcaaatgccttaacatggcttacaagatgctagctgatcctggaaatctcatctcagtcaactttctctctcatctcctgtgttccagctgtaactgtctgctgctttttttttttttcagttcctcaaatttggcaaattcctttccatctcagacctttgcaagaagtattctctgcctgaggaactctctattgccttcctcctacttactacttttctaactaccagctccttcttacctttaagtctagaaagcctgcccctccaccagaatagtctcttccttcccagaagtggtctacaatgtaaattttccattctcacatcaagtaatggagtccaattcccttccccttgaatataagctggctggcctcatagctcacttgcagccaacagaaattgctagaagttttgttgtgtgactttccaggcaagttacaaagcatcatgaagctcccacctaatgttcttggaatgcttggtctgggggaacctggcacctatgtaagaaatccaacaaccctgagaccaccaggctgaaaacaacctgtggagctgctccagttgacagtcccatctgagcttagccttttagccactgctaccactaaacatgggagtgaaactgtttggatcctttagaccaggctgttcacctgccacagtctgactgaattcctgatctactggattcataaggcataatctaacagttgttgttttaaataataactttctgaggtagtttgtcatgcagcaatggtaatgggagcacctccatagtagttattcagactcccaaatgttgacatgttggtgtgacatctgtgagatgggaagctctgtgacagcagggaccatgcctatcttcctcactactgtatctccaatagctaacataggatttgctatgttgtaggtgcccaataaaggtaaaacactaaaggtgcccaataaaggtaagatgtaggatttgctatgttgtaggtgccaaataaaggtgagacagtcccaaagtcttagtatggttttaggttacttaaagtatttaaagcttgacgctgtacaaagacttctgggatatcctatgttaaccgaagaaaggaatgagctctttccatctcagcctcttgtaatggaatctgacatttgcaatttcagtcacgaggaaataacttagaactaatttctttcaggcttctaaactgaccagtcttattcataatcttctactgagatgacaaaatgtattataagttatattaatatctttggaaagctgaagtaatttggtaacattaaatgtcaggaagtagcttcatattaaagctgaacaaagactatgattacagagagaccatccaatatcaataagagacaaacacaatttcttattttttcagcaccagttttaataaactcattaactcttgtgatgatgtttctgccagtgaatgatagagaaatttacaatacttgaattgacccacattcaccttaaaatagaataggaaatatcagcctcaattacataattgttttggattctctagacagaaataattttcagggttgtcttgtccgtgcataatctgcaattcaaactagaggcttcataatttttctttcaacttctttgtgataagaatccaacctgtctcctgagtttaaatcttgcctgatatgttttataaatatctgatcttgtgttgcaggatgattctgaccaacctaaaattagactgtgagcatgatatctctttatgtcttcagaatccttctctaaaggtttgtgaaaatgctataaccaccaattcttctctaagcttggccctaacatattttctcacatatagtcatcttatataggtgcttaataaatgtggggttaaatcactcgataaaggtcactcagaagatggatcatatagctaaacattgattactttggtttttttttttggaatgtcaattaggcagaaaaacattgattactttgactttccctttaaaaggtatgagtcacctcagatatataacctcttatgtactaaaaacagtttatagttgtgaaatagtccaaaattctttctttcttttttttttatttttgagacagagtcttgctctgttgcccaggctggagtgcagtggcacgatctcagcttactgcaacctccgcttcctgggttgaagcaattctccctcagcctcccaagtagctgggattacaggagcatgcaacatgcctggctaatttttgtatgttcagtagagatggggtttcaccatgttggccaggctggtcttgaactcctgacttcaagcaatctgcctgcctcggcatcccaaagtgctgtgattacaggctgggtgtgagccaccacgcccagccaagaattatttctcagaggtgattttgatcaatgtataaagtcaggaggcgctaggctatgctgcattaacaaatatcccctaaatatcagttaattatttcttgcttttattacatgaccagtttgaatttgtgtgtgtgtgtgtgtgtgtgtgtgtgtgtgtgtgtgtgtgtgtgtgttgggcaggaggagggtgtcctttaatcattagtgcctacacttgacagaggttccatcttgcaatatgtttccaagatcacaaggacaggaaaaagggcacctggcaaattgtgcactggcctgtgatgctcctacttggaagtgatgcatgtctcatgctctcacaattcattagccaaagcagtgacttggccatgccaattttcaaaggatgtagagtagtgcaagccctccatgagcctggaaggagcaagaatcacagtatttgtgaagagctgaaatgactaccacaaattagaaagtgacccagggctccccaaataagcaatcacctgttaaaaagaataaatattccagactttctttctctccaggtttatgtctacatgcccagtagaagacagttaaaataaagtttcaaataaatacgagctcctttgaaagaaatagttgatttgtgtttcaaaaggaagatagtattctgtatctggtagtatctctatggctctagagataactacagtttgatactagaataatctaccaaccatttttttcttttttcttttctttcttttttttttttttgagatgaggtcttgctctgttactcaggctggagtgcagtggtgtgatctcagctcactgcaacctccacctcacaggttcaagcaattctcccaccttcccacctcagcctctgaagtagctgggactacaggcatgcactatggcaccagactaatttttgtgtgtgtatatatatattttttttaattttttatttttttaatagagatggggtttcacaatgttggtcaggctggtctcaagctcctgacctcaagtgatccacccacctcagcctcccaaagctctaggactacaggcatgagccaccatgcctggcctaccaaccattcttttttttcttctttttttttttttttgagacagaatctgactctgttgtccaggctggagtgcagtggcatgatcttggctcactgcaacctccacctcctgagttcaagcgattctcctgcctcagcctccagaatagctgggattacaggcgcctgccaccacgcccagctaattttgtatttatagtagagacagggtttcactgtgttggccaggctggtctcgaactcataaccttgtgatccgcctgcctcggcctctcaaagtgctgagattacaaactgagccaccgcgcccgaccccaaccattcttaaaaaagaaatgcttaggttcttgctacccaaaatgcggtatgggaccagcagcatcagcatcatccgggagtttgctacaaatgcagcttctcagcactggattaagatatctggggaatgcccaagaaatcaacaatatatcacttttgaaattacacaatcagggcctgacagtctttttttttttttaaagctgttctttttaaattttgtgttttcaaactgtcctaaggcttaagactcaaaaaaaattacagggattaatcataggggaagcaaaacccattatatttaaaagttgtgtgtgcataatattttatttcatgggagcatctcatgggactgaaatcttaattttctagtctcaaagagaacgacagttgtatgatgctactttagctcctttagggaagggcaggtgatacaatactgagcacaacctacatgtctcacaaaaagttcaccaaaaaagttcaggttttccccacacttctttggattaatgatcaggtcctcaaagaaaaactaccatttccaaactttatggaatgtgcacattctcatagcctatctgagacatcacccattctggggagagggtattttgctgcatgtgaaagacacactattcttaacattaatacagtagtgaacatcagaggcaatagtcatatttgggtttctttcattcctaaaagcaagaatgtatccacaaagaatgaaatgtaagaattaagtaaaatgaaagaaaattgcacaaaattatttcctccctgaattgggggtgggagagtggtgctttttaggaagtttcagtcaacattatcccaacctccctggaaaacataaacctgatttggtgctcaacaataacgcctagatttgtttaatgcttgttgtgaaaataatttcactctagatacatttcttaatgtaatcaccacctggggagagaaagaagatacaaacgaattgccatacattttgtgactctatgtaacataaataagacaaaatttatccaccagttttatggtgcattttcctttatacatggctccttcttaaaactactgcagcaagataccaaaaacaattaatgagaaacataaaacacgtgcagataaggtagggaaatgtatgtgtattcagagtcactaagagacacctcagttatcttccttataatttagacatcttggcacagttttattccctactgtttgtagtaatttttctgctactcccaaaataagcaagttttatcatctgcaaatacatgacacttggatagggtggttataacgctgcctccttgtttctctcgattaaaaaaagcctgtttcacaggaaaataaatcacgatacctaacccaaatgtgaaagaacagactgagcagaactaacaaaactcatttgctcttctagtttttaaaaatgtgagttttggacatctgattcctgatctcaccctcaagaagtggatctggttataaagtgatgatgttttacagtacatgtgaccatagtttagctgctataatattcttaatatagttacatagccaggctatgcaaggtttctcacaaaaccagaaaagctattcgatccttatcattcccttcctgtactgttctcaataactggcttctcaaatcgttcaggaaaccactgagaatcattaacgggttattggaatgcccagagtgactgcccaaggacaggaaaatgcactggctctttttagaagaacctggaaaagtgcatgcagaccattgcggctgagttggcaatggatgatttccttctcacagtgtaatgtacaatagctgtaatttaattgttaatagaacacaacatgcagtctgtcttcaggcctctgtgtttcttgtggtattttcttcccaggttggagtgtttttgtataatcacatcttattctcttttaacagttatcaactcttggctagatccccttatacaatacagagtatagtttattctcagtagtgtagccatcctcattattatcaaacagaactaattgctgagatgctcatagtaatatgcaaaacagcttgtcctttgttatttagaaattgtttatattaagtttatattctcttttaatttgttaaagatataattctttgactgagataggacatttcttctcattggtttatttattttagagatgagatctcactatgttgcccaggatgattttgaactcctggactcaaccagtcctcctgtctcagcctccccaaatgctaggattacaggtgtgagctactacactcagccatttcttctagttttagatctatataataaaacgatgcttttctgtgatcccttaacattctctacactcaggtgcatgttcaaagcatatttgttttactgttgcctagttttccatgtcattcattgaattatccaatgcatattaattatcagtcacttttcccattactaagggtacttgagtgaacagagcagacaaaaaccccacccttaaaaagcttatattattttcaagttgttgcaactttgggtgtttttaaaaaataaaaattcccagctgataaaaccaacttatttgacagctacctgcctcaccagtagaaccaagttatagccagaattcagaaataacatttttgagcatttattgtgtctgacaatgtgccaatcactttacatttattttagctcatttaatgcttacaacaactagaaggaggtactattaggatccctattttacagatgaaaaaagtgaaggtcagagagattagttaagcagagggtacaagattaggttccagttgactcttaacaaccatttcatattccaggtgatgctttacagacatctgatgaatggatggatgaatgaatgcatgcactttgggaactcccattcagcttggcataaatactaactccttagaataccctagaaaaatctagaccttttgttggaagaaaagagtgggaagggtggtagggaattattttttcgagtgaattgaggcagatgatcttacagatgactgggttctagtcagcatggttgccttatctggtgagagatgagaattgggcagacaccagttctgtctgccctgggccctcaaactgagtagcctctgagattcaagttcatcagcacagtgttggaggacagttcctgcagagccccatgaatcagaggagactcggaggcaggaggaactggctatcctaaaggtgattttaaaccggggtagctagagcccaaagaagggcgaaaccaggactaactgccccatagcatgaggggcagcgcctgtaaaattacataggatttgtaaaggtggaaggcactgttgcgccgggtaaagcttcgcaaggtcgtggtaggggaaatgattcactccccttcactattccctcgcagcatggtcctcacaacccccttctctttccccatttccatttccggactcttctcctgcccgcagggcagacgcacgcgcagagagattgccagccctggctgccagagacccggaagcatcgatcggctctgtgctcggcttctagacttgtcggcgctcgattgaggagcgtggctacgttgcttccggtgcctggctccgtttcctgcttttggttcttacagtagtcggcgtaggccttaggtgggttcgtgcgccttctacctcgctgtttcggttttcctggctcctcggcccttttctcccctgttgcagctgggagcggacgaagcgcgaagctggggtgggtacgcgtttggcccgggtttggatctcggaggggcaggcttgggggtgaggagactgactctggggccgggcatcgcgtggcagctcccttggacttcgttagggggccttgggcgaaggtgcttgtgtctggagaggcgggaggcttgcgcgtacgaagtaaaggatagttaatgtcagtctgctcgtgcgaggcgtggacagttcactgcgctttcaggtgtcttccagcggctcccttttggtggtggcgggtaattcagggtgtccctgtaacaacgcagcccacgatcaaacctcgcatgaaaccctgcaagagcctcccctttgtccccctaccttcactttgacctctgcctcagtcacttccctttcgtcgtctcctttgcgacccctgccccttctccagatttcgatttagggggtcgcaaggctttgagaagcgttacgttttacctgttacctgcacaagtgcagcccctgcttgtaggctcttcccttgtcaatcatccaatgcagttcacatacagtggatgctctgtaaatactgtgagataaaggaatatgtggggcacacaaggaaatcatccaagttcacaatttgcaagtaaaaaccatgtaaaaaatgcaatagtgtggtatatgaggaagacaagtgtagaggagaaagcaagggctgaatttccaggcctgatgcttattagctgtgtgaccttaggcaagttccttacctggtaatagctgttaataatagctactcttaagtgtttaccgctgatgcagaactgtgctagaattcatttagtcttctgagttctattgggtaggttctgttaccattcttattttactgatgaggacctgagaggttaaggaacttccctcaggcaaacagctagtaagaagcataaataggatttgaattcacatctggctgatactggaatctgagtttaatcgtcatgccacactgctgtcattgagctcctttctttcaagtcggttagagataaccttggagtccagacagcttggtgatgctgtatacaaattaataggtatggaaggactttgtaagtgcacccattaagtagttggcaaacttcattaatgtctaaccttatgatttttactggatgtacatttgctactttggtcatttttcttcaaatctacattttaaaattatttcattgaggaggtggaaagaaaatgtcacgtgtcataagtgaaacgtaagtgtaaaaataaatgtgttgaattaaatggtgttactaaaatctggctaggtattggtgctccaagttttgaatgtgagaaactgttcttcttctgtatgaaaaggagggctagtaggtgctggagatacaataaaggctacagccaaactgacattttctgacaactgggattgaaagagaaatgaaaagttaataattcttgtgttgtgtccttatgccacagtccagtataatttactccttcctttttataacagattttttactgtctcctgaagaatttaacacaaacatggatatcagaccaaatcatacaatttatatcaacaatatgaatgacaaaattaaaaaggaaggtaagtgctttttagaatacttgttcactactaaaatgtgtttatttactactgtcttaaaaattgtactgcctcaaaacctcttacctcatcatcttagtgcctgaaataatggtttatcccatttcctatagggatttgaaggcttttaaaaaacaaaaataggtaggaactgacagtgtgtacagtctgtttctactcatagatataatggtttcatataacttttaaaattacatatagccaatgggaatagtatatgtttttataaatattaaaatatataactgtataaataagtgaatggtggggggggcaactcaatgcagtatcattttatgaagacttttgtcattactttattaccaataacttgtttcttttctaatttggacagaattgaagagatccctatatgccctgttttctcagtttggtcatgtggtggacattgtggctttaaagaccatgaagatgagggggcaggcctttgtcatatttaaggaactgggctcatccacaaatgccttgagacagctacaaggatttccattttatggtaaaccaatggtaagccaattccattatttcactttaatcaagaaattaatgatattgatgggacagtagatttgtaaatatgcttgaaactgtggctattgctttctgcttttaattatgtgtgtttgggtttatgtatttttatagaaaaacagtagtggtagagtttaatttatgacagttcagatgggcaaaaacaaaatacattgagatgtagaatattttaaaaaataatggcagtctaggcaatagtcttatctcaaaaagttagaaattaataatatcctggaagacttgaaaagaaacctgtttgtaaacttgtaaaacattacgaaacaaaagtcatgagtcaaagaggaaattcagtctgaagttttagaatatgtcgtagtgaaatactatgtgtcagaagctgcacagtctagatgaaacagtgatctaaggaaaaatgataggtttaaactcataggttttaggaataacaatggaaatgaaatggttatgaatggagagttttaaactcaggaatgacataatgagattcacatctagctgctggatgaaggtcgcattgtgggagggacagaaaggaagtgggaaactcaattaggaggcccttgatgtaagtcagagatggtagaggatcagataagggtgaccacagagtgtgaagcaaggggtttctatgtatgagtgaatacaccatatcttaggtgtggattccaaactgctttttttctgcgattagaatgtgatgtgaaggagtgttggacagagagccaagggccagggtttagaggagctgggtcttcattctggttgtactattaactggctctgtgcccgtggttagttttaccacctccggtaaacaaattggttgttctttggtctaatgcaggcatcagcaaaaactgtaaagaagtacataataccttaggctttgtaagccatatatggtttctgttacctgttcttttatgtacttacgttttttaacaaccctttaacattatctaagaaaattcatgtaggccatgctaatgcaggcctgtgggcagggtttggctcacagactgtggtacagaccgctgatctaacccattcattttgcagatgaagaaacaggcatagaaagtttaattgttcatctaggttatagtaatataaccagtggcagcctcaggagttgacaactaatctaacagctagtattgtgattttttttctgcattacaggtcagcaaactttccgtaaaggaccagatagtaaatatgttacactttgcaagccagataatctgtgttgcaactactactcaactctgcttttatagcaggaagagcagtcccagatgagaacaggcagtgttggctacagacagtagtttgaggacccctgttttataccatgatgcttaattcaagcctcagcacctttttttctgttattagagcaagttcttctcatcctctatccagctctccttttcccatcacttcccagctgactggacaccatttttgtggaaaagcctatcccaggaaactgtgggatggtacctatgtaatgtaatttttagtatattggtgtttcctgaaaccaggcggtctctcatagtagtataaagaaacaccataattgagatctcagttggcagcagcatagggcctgggttttagcttacatctaaaattatattaacttgaaagtacagtttcttcccatagagggtttagagctattttgctgagttgagatgacaagtttgcatgtgtctgttactcagatacaggaaaggaaattgtttgctgtgttgggcaccagcctcaccttgccaactaattattttttaaaattagtgggaaagtgtattagattgattattatattgaagcattttgggaggtctattcttttcctacagaaaggtaacagatactgccaaatctccatcttagaagaggggaaatagagttctttgggctgtcttgtttatgtcttactgtggttgtagttgctcttctgttttaactccaacataccgatcagaaatgaacaaaatttgctataacttggaactcagaacagaattactctctctgattcaagggcatttagttaatgccaaaagtaccttaataaagtagaactgtcttcctaagggcttcgtcatgaaaactttggcataagtgtaaatcttgcccttctctaagttgtggttagacttttatctctaataggtatttagcctagactagcgtttctcaaccctgtcactttggacattttgaaatgagtgagtctttgttgcagggggctgtcttgttcattaccccgtgtttaacagcatccctggcctctacccacaggatgccagtagcataacaacgagtaatgtctccagctagtgctagctgtgctctgacagacaaaatcacctctggttgagaaccactggtttaaatgagccagctaagagctattgctgagatcaggtgttttcacaggtgactaggtcataaggacagacaaatcaggtcaccgaagatctattcaggtcaggcacgaggttgcagagccaagggagttgtgagggaacccttaggaccaagtcagaagttagtctaacccttcagcctgtctccttttggttagatgatgatggcaagactagcagagttgcatgcagggataagcacacttagagccactgtggtacggcagcccagaccagccagaaagagcctgggattctgaggtgtgggtttaggcctactccctcccctcttgtttccccagtgtagtcatctctagctgaagtaaaggaagaggaagaactgatcttggttttgacaaattctttgctttgtaatccacactactttaaaatgtttcttgttctcttcagatcaagatcaaattcttgttatacgaggcaataaaattttgcatacctattgtatacaaagtaatttgtacagattactacaaagtagtaatttgtaggattattgcattttgatcagagaggcaataattctttcagctccaaggaggaagagtttgcttgaaatggaggttggagattgcagatagtcctacctagataacggtttaacttatggcagaaatattcagacagttcattggcgctgagtatagttatgtgataatgctttaagccagggctactcaaaatgtggtccccatgccaataacattaccatcttctttgtgcttgttacaagtgcagaatcccaggtttgcccagacctactacatcagagcttttacctactttccaggcatttggaatgcaaactataattgatcaaatactatcttggacaagtttttgaacccttccctgttgtaactgttgcctcttggtgccagcatgaaaggcatatgcaagtggtccagtcacattatctgtgattccattcttttgtttccttttaaaacattttaaaatttagtaagttgattccactgttaaagtcatttcatgtaaaggtgatagattcaaaggaaagtcattcccagtcttctgtacttttaactattggaagtaacattccatatgacacattccacagctgcgacacatgtcaatgcttctattgagagtcactggtaaggggaaggcaactctccaatgcatttttgttgttgttgtttttgttctgtgtgtgtctgtttttttaaacacacgtgcttatagcagctttattcctaatcgccaaaaactgtaaacaaaccaagtatccttcattgaatgatgtaaatcaaattggtacatcaatacgatgaaatactactcgctgttaaaagcaacggcatagatgaatctcaaagacattatgccaagtaaaggaaggcagcctccaggttatatcatgtatgatcctatctatgtgacattctggaaagggcagcagggacagagaacagatgagtgtttggaagaggaggggtggggtaacaaaggggaagcatgaggggatttttaggtgatagaactgccctgtgtcctgattgtggtggtagatacattaatctttacaaatgttacaactcagagctgtacatccaaaaagttacgatgcaaaaaagttttatttaaatcctcacatttatgatgtttagaattctaaaaaatgaaaaaaaattcaaataaactcattaaaaatggtttaaaagaaattttccatctagttttctgccagaaaagttgttctgtggggactctgccaaaccagccctagtgttctgtgggcctattctatctgtaaaacaggattagtctagaatggcgattttctttatttttcaccagctccctcaaattgcatccctaggtgctccctctgtgactgtggggtgagggtaggtttggagaggaaagggcatttggcctccagtgggctctggagccacagttctatgtcaagctgagcagttttgcttttgtttgttttatatgttgtttgttgaatacctctggattagaatagctgatcttgagccagatcctcaggcactgaggagatttgaacagttcaggattccaaagcccgctggtggagcccactcatttgttcctttaacacttcaatgcagttttctctattctttgattaaatggagagaagccgtggtacagatatttcaaagtcctgtgtttctcacatgaaaatatatgtttttttaatctaataaacacacttgaatctaactttgtctaaattatgaattatagcccacagtttacttccatttggcactcagtatattctgacagattttcttagggatatgtttaaaattagcttgtagtgtatttgcgtaatgaaatttgaaatattaatgactagtgtaaacatccttcagcatgagaagtaacctgttttcaaataattaaaacagcgaatacagtatgcaaaaacagattcggatataatatcaaaaatgcgtggaacttttgctgacaaagaaaagaaaaaagaaaagaaaaaagccaaaactgtggaacagactgcaacaaccacaaacaaaaagcctggccaggtaagaaagaccaagaaagttcctgtttgtattggtgttaaaaacttgatagatgcttgtcttacaggtaaggaatgatcttaggcttgtctgtatatgtgcataaatgtgtgtttaaaaggtggttttaagaagctagaatggttgacttataaaattcagtattaagaaacaaaatataaaccttaacatggagatttatattaagcagttttatatttgcatggcatttaattcgatcattgtttaaaatatgttaataccttttggtttatttctcaagttttgctgcctataaataatactgtagttattatctttaatcatgagtacttcactcaaagtatctttctggctgggcgcagtggctcttgcctgtaattccagcactttgggaggccgaggcaggaggatcacgaagtcaggagatcgagaccatcctggctaacacggtgaaaccccgtctctactaaaaatacaaaaaaaatttagctgggcttggtggtgggtgcctgtagtcccagctactctgggggctgaggcaggagaatagcatgaacctgggaggtggagcttgcagtgagccgagattgtgccactgaactccagcctgggcaacagagtgagactctgtctcaaaaaaaaaaaaagaaaaaaaaaaacccaaaaaacaaacaaaaaaaacagtgtctttctttgaacaattcagtaatgcaaaatataatttgaaataccagataaaagtgaaatgaactgcttggcgccatggtggctcatgcctataatcccagcactttgggaggctgaggtgggtggatcacctgaggtcaggagttcaagaccagcctggccaacatggtgataccccgtctctactaaaaatacaaaaaattacctggccgtggtggtggatgcctgtaatcccagctactcaggaggcttgaagcaggagaattggttgaacctgggaggcagaggttgcattgaggcaagattatgccattgcactccagcctgggtgacaagagcaagactccatctcaaaaaaaaaaaaaaaaaaaagtgaaattcaccaaaaagtaattacttctggattgaaagtgattaaaagtcagttttattaaatgacttatgtccagttgtttttaaaagtaagactaggccttggttttctcttatatatttctccataattttaaagctaagaggttaaattttataatatactatttaaagtttagggctggtcttaacaaaaataaccgacaaattaagaacatgagtgtttgagtcagtgttaagatataaattcttaaagtaaaattaaatggagtaagaaggatatctcttggaattaatgttatttttaatgcagtaattataaatataaatacctgctgcgtttttggagggattggatatttaaactctccctatttattttgcttagggaactccaaattcagctaatacccaaggaaattcaacaccaaatcctcaggtaattttttttccatgtcgtgcttaccttaaaataagattgtaaaaattacagcagtggtataaaacaatttccatgtctccaaaaacaaaatgatttcatctacaagacacagtgcgttaaattgtctgccactgcaatgtaagaactcaactcctgaagaacattttaattcttttttagagagagaaaacgacacctgactttatttcttgttttccataatgaatcaatgacagaatcaaaatgacagactttaaactctaagggctgggagcaaacattttggtttcctctacagtacctaaagctttacacagttgcatgggtaagggtaactggcagggtcaggggctctcttccattccagttggttgaaacactacagtgttacactctttgggcacatagttttatagttaacctttgctctcacttcctgaacacaaataaattccagccttttttttttaagcctccttgtacaaatgttttagaaactccgtattaaatctccccatgacatacctcaaagagaaggcctcagtaatgtgctgatggtttcatacttttttttttccagatggcggggtctggcaagatccttaaatccatagaattctctgtaccactgaggtttttctcctcttgttttaagttacttgggttttttatctcctcagcatttatagtccagttcacaaatgccagcacttaatcctctaagccttgagttgttcactaattattttttatacttgctcttttctcttttatgacagtagcaggaagacagagctcttttcttatatagaagaccctttctttagttccccataacctctgggtgggatatcaaatgagtaatatctaataaactaagtgtttgttactgcttgtttgtatgtaactagatgctgtgtatatctcatttatttgccaaaaataagtaaattaaaagtccctaagcagtggttctcggtggtaatctttctagttccaatttttttttttttttttagtatgctgggaagtagtaacagtacagaggaattgagtatctgagtgatactgagtgtggtaaccagctacggaggggtgacattgctggccatctctaattttattaagatctttgattatgttatccaggtgacaaaattctccaatcacgactcacctccagaagcttaaaacataattgtttcatatactgttaaacacttaagagatttgtaattttccagactttcagtgtctttacttgaatgtctgccttgcttagttactgtaaggttttgatttatttctccagtgtcattgtttttcagctttattgtttgatatagtaagatttcacatgcctagcttacgatgctgtttaaacttacaagctaactttgcctttttactttttaataggtccctgattaccctccaaactatattttattccttaataacttaccagaagagactaatgagatgatgttatccatgctgtttaatcagtaagttttttcataaataagtctgtttctgagagcttcctcacaggacaagtagtacttccgtgggttgaatccatttatcacacagcagtaattccttacaggttcattgatttggtttgggatgaatcatgaattggagccaatttgccgatttagcaaatacaaagctaaatttcctctaatgtttgaattcttaactctgattgatgtaataacaaagctttgatataatataaaatagaattagtttattcttgcagttcttccatggtattaattacacatgaggctcttccgtctactcagtattcttggttagagtatggttatttttcttggactagtattaggaagttgcttaacaaattttaacacaaagcaaacatttatgtacttgctgtatacatgaattgtttttcttctttataggttccctggcttcaaggaagtacgtctggtaccagggaggcatgacattgcttttgttgaatttgaaaatgatgggcaggctggagctgccagggatgctttacagggatttaagatcacaccgtcccatgctatgaagatcacctatgccaagaaataacatttgggatagtcgtctttaaaagacttggtgttatttacagtgtttgttttgataacatttggctgggtcattttaatagttagagatgaggaggagtaaaagtgaaatttttgtgaaggacttaaattatccagtgtttctttagccttggtgaactatgaaatacgaaggccttaattttgtacaataaacttttatttgtattctgtgtatataatgctttcttgattgacccatctccctatcatcaaatgacttctagtctagaacacacttaaggtttataaacttgtgtaataggatgcttttctagtgttactttggaggagctaattatacaacatcattgaaccattcaataaaagttaagtaaaattagatcacagaagctagtagatgactgttgtattaatggtaacaatgattgttctgggtattagaagaaaatgagacccaggcaggatctaaatttgatctttgtatccttttaagaaatgaatatattattttgctgctagtagggattccacaagttttcttcattcagtattaaataaaggctgttcttactgtttactgagaaaacagaaagggaatgctatcttcacactttgcatttaatgctgtttccttcatgaggcaggactgttctaaggttaatatgcaatctctttattgaaagacctccagggtaaaaattttttgatctatagtctcttttcccccttaagacaaatagactgattaataaagagttgccagtgctaagcttgctacttctttgtaattcttaaacaccaatgttcaaatatttccaaagcccattttctttagcttttgatttatgtttaaggctattgattcagtcctctgctgagtaaaccatgggtatctccagaagtggacaatttgtttttacaagtatggtacatattaatagtaacaacaacaaaaaagaaaacagtacttatttttctggtgttcctgttttagtattccttgaacaaaacctttatcacttggaatttttattgtctacttatggaaagacttttagacttacgtagacagtatcacatcactcttatgcatacataaagaggaaaaaaatgtttcctataactttgtcacagttagtctgactcttctgaataacttttttaatcccagtagtcaagctcctgtacttttgtaaaatatattaacagtgaattactagaaaatgggccatgttcttgtatattacagtgatgtcaattgctgataaattttctaactgcttactctcggataccgtacttgtctaagaactgaaaataattcacagactgatcccatgcccagtcctggccatgctttgagtggctgtattggagcagaaaagccagggtggctcacctggggtgagaatgaggggggtgaatagtaagaggggtcgtgtaggtcttcttcaggatttgcttatactctgagtgaaatgggggactattttagagaatttttttaaagtgggttagaatttacgtacaataaagttcacccatgttagtgttccatttgatgagtttgggcaattgtatatagtcatgtaataatcagtacagagcattccatcacccccaaaatttcccttgtacgcctttgcagtcaatctattcccctctacccttggccgtagtcaactactgatctgctttctgtcccaacagtttcgccctgtctggaatgctttggaaatgtatctgctgttgcctatatcagcagttccaccaatgaatgggcatttgcgttctccaatttgaggctattaagaaagtggctatgaaaatttacatacaagtctgggcatatgttctattagatttcaagcagaagagtgatagtttgatacaatttctaatttacataaaagttgcagaaatggtacacagaactttcataacacttcaaattaatcattaatgtttctaggcttctgggctatttgaggttgtgattacattgacctgataccccattattccatgatacttcaatgtgtgttcttaagtacaagaccaccctcccacataaccacaataatgaccatcaaaaccagggaatgtggctgggtgcgacggctcatgcctgtaatcccagtggtttgggaggctgaggtgggagggtcatgtaagaccaactggggcaacagtgagaccttgtgtctacaaaaagaaaaaaaataagctggatgtggtggtgtgtgcctgaagtcccaactactggggaggctgaggcaggaggattgcttgagcccaggaggttgaggttacaattatgtgtgatcatgccactatgctgcagtccgggcaacagagtgagaccctgtctcaaacaaaacaggaaataatcccatattatcatccaatccaagttttgtttatattccaataatggctcaagaatccaatccaggattgtgttgcatgtagttgtcatgtttctttagcctcctgttgattcctcagcttctccttgtctttcatgatgtgaattttatatagagatagtctgtctacctctggatatatctacacagttatgttaaaaactatgaatgtctaagaatgtctctgcagtcttaacagcactgagttcatcctggctctcccccttcccctgtgtataaatcacttctccaccagtcccattaacttcaatatattatatttgctaattttcccaaatctttcctgtgcaatcaaactctataaggcttcaatagggagcaggggaaaggaaaaaggagacagcaatgctttaaagaagatttggtcaaaccaagatcttttgaccttccctatctcatccatcttttgggagtgtgagttttgaggaatgattgaagggagtagatgttatttaatatagtggttcttaactttggctgcatattagaatcatctgggagccattttcaaatacccatgctcaatctacaccccagatcaattagtctccagggatgaaacgtagtcatcaatatttttataaacccccctccccccccagggtgattcccttgtcacccaagattaagaactaacaaagcaggtttctactttcatgaagtagggcatcatagatcattgactcaaatggtgtttttcaaaagtagtatattgataaatagaggataatgttaattctggaaatggttgtgatgcagggcaggcaagcctcaaacttggggcttagcccaggaggattcttggcttcatccaggaaagaattcaagggtgagctcatggtggtaaacagcagtcttttggtaaatagtgttgccccttgcagagcagggctaattcatacacggtgtgcccagagttggcaaagtattggctcttggcaactgcatttatacccagttaaactcactttcggtcacatgcaaattaaggggaggctcaatacaaattgaggggcagattatttagaactttctaggaaaggagtggtaacttctgggtcattgccatggaaaggggtggtaatttccaggttgttgccatggcatttgtaactgtcatggcactatgggagtggcttatgctaataaacaatgaagacagctgaggatcgcttttcttgacatctccttgtccctgctggtttcttcactttttactgcctggaccagatcctgttctggtcagcagggtggtgaccagaaaacaagttcttctggtctcctacctcagttgcaagaaactcaaaactccattttaaactttaagccttatagtatcttctgtttgagtatttaacaagcatttgtttttccttgaaaatatatccagccaagaccttatgaagaatgtgagctaaaattacggtattttacttgcctggaaacagtacttctcaaatgttaatgtgcatacaggtgacttgagtatctcattaaaacgtagatttagattgtgtctccggggtgaggtctgagaaacttcatttctataaagtgatgtcaaagttactggtctggggaccatgttttggtggcaagttgcaagaccccagagtttctaccctaatgatttattcaatgactcttagaggtgttatcaatctgtttttaaagccagggactttgcccaggggaaaaatgcatgcatacacacacacacacacacacacacacacacacacccctatgcgtacaatttcggagcaattgtgcattcattcagtgaatacctatttaatgcacaccaagtatctttccgggtgctaatgacagagtgaggaacaagatagcaaagatgcctgccttgtggagctttcattatactgttggttggaagacaaactaagtaaataaagcaggcatgtcagctatgatacatgccttaggacagtgtactgcagccacgtgatacagggattgggtggaggaaggtttgaagtggctcttttaaattgttctgtctgtggaggcatcttggccaggaacctgaatgccagtatctggggaaaagcatcctaggtggtaagttcggagcacctgaagcagaaatgagtttagtgttttcaaaagttagagagaactggtatgggaggaacagagcgagtggaggagagagcaaaaggtgaaatcccagaggtagaagggcctgatcctacaggagcttgtaggccatgacaaggaggctgcctgcacttgaccgagcccatgcttagatcctaaaggagccatggcctccatttaagaactccagacagagaatctaatttaggaactgaaggggaaaaatgtcatttagggattgaatgtttggagaatacgtctgaaaatctagaggaacgagtatgaaaactggggccagaaccctcactgaacccccagtggccccagtgtctttggcataactgccagacacagctacttgctgaattattgcaagttcaaattcctatttgcatgcaattttaccaagaagcctctagcttctgtcctgtgtctgccactttagaatgccagaacaccacaagctttcccaggctgcactcagaaggcttggttatctcattactttatttcttcaccttcaaatgtccaataatggcttcacgttagcattagcctgattttctaagttgtgatagcttgaatgtcacattttgctttttgtttttaatcattttatcctgcttttggggatctgtatatgctccccaatggggagtttttgcagtccccatttcttcaagtgcctcttaaatgacaattgtcttttaactctcctatgctgagggctggtttgagactggaacagtccataaaacagctgcgcaatcaggattaagaagatttaatcaatgctttagttttcccagaaatttagacctttagattgattacaggggaaaaattggaaaggcattctgctttcaaaaataatatcgaattcaatctttccttgatgtgaaacaggaaataaatgatttattctaatttgtcaattccaagttgacaacaatgaattgaaatagcattgaaccatgatccctctggtaacctttagataggatggttcaaaatgaccactttaggacaggtgcggtggctcatgcctgtaatcccagcattctgggaggctgaggagggcggatcacttgaggtcaggagtttgagaccaggctggccaatatggtgaaaccccgtctctactaaaaatacaaaaattagctgggcatggtggtgcacacctgccagcccagctacttgggaggctgaggcagcagaattgcttgaaccctggagacagagggtgcagtgagccgagattgcaccagtgcactccatcctgggtgacagagcaatactccatctcggaaaaaaaaaaaaaaaaaaaaagcaacaaaaaacaaaaagaccactctggcatttgctgtgcctcagtttccttgtctataatgaaggtatgaataaaacagactttccaatcaggaccagctatataaaagatcctcccttgaaagtcacacacacatacacacacagccacacacacacactcacacacagccacacatacccacacccatacccacaccaaaactcttttacatacacacacagatgcactcaaaccaatacaactctatcacacacacacatatacccaaaacaaaaaacctttttattatattttgccttacccatttatcccttgggaaattgtattgcacaaaattatttagtaagttaaattcttgtccctcattttatgaggttacgactttggggttgggggagaaggcactgctccgaagtcacatcatcaaccaaggtggagaaggcatcctgagaggatctctattctagaagcaatggataagaacaggggaagggccaccttatgggagagatgccagcctcaaacaccctataaaaagcagtaacttactgtctgtctcttctaatagaaagcaacacttggggccaaaatattttttttaaatttactgctatatctttagtgcccagaactatacctggcacagtaagtgctcagtaaatatttgctgaatagacggagctagggactggcggttccactttggtgcctctaggagtgctcctctccccatgggaaacatgctcagaagcaggaagttccaggtaacataaacttgtaacttcactctcttctctttgacctgtcacccttgagcatttgagactgaattgcaaaagtcttagagagaagaggtaggggaaagattgacctatttttcccaacccacccatctctttccccactggtagggtctaaatggggcatcaattagtatgttagaattcatctctagcctgggacaggcatgccttctaagaatcctatcatgaaagatttgtaagcataagaatctttcatttatctattacgtaaatccagatttattaattgaatttgtttaaatcaaattatttgtgctatagatctcacattttcaacaaattcctacaactagtatgtctttgctcataagctgaaggaaaattaggggtgaattaaaactaaaaatggtttgaaattctcatagtcctctcagcaaagccctactgattgatacaatagaccactgctaaagcggctttaacaatagtggaccattttggatattatctgtgtatagaaagacacagagtttgactctgtttggaaaatcagacgctaaatagcccctgaagccgagcagcctgttatgaaaacggaggggtggtaggcccttctaattggccagggtatttacccagagctctggctttcacataaaaggcaggaaccactgaagtcagtccccgcttccagtcagagttcaagttaaaacagaaaaaaggaagatggcaagaatattgttacttttcctcccgggtcttgtggctgtatgtgctgtgcatggaatatttatggaccgtctagcttccaagaagctctgtgcagatgatgagtgtgtctgtaaggacttttttatgcttttcattatctttctattacataattgaaaatatatccactaatagcataaaatcgaattatactttgaagtgaatcttctccaatgtgtatgttatcagctttgtttcttctggtctgcatgtttggtatcttactacggagaattcacttggctgagttttgttgcagctttaatatcttggctgtcttctttctcttggatagacaccagctatgaactgggaattatcagtcactctgattttctagtttttctaatatacattgccttttactgttataaaattcaggagcctaaaatgtaatcatttaaattttttttcttccagatactatttctctggctagtgctcaagaagattataatgccccggactgtagattcattaacgttaaaaaagggcagcagatctatgtgtactcaaagctggtaaaagaaaatggagctggagaattttgggctggcagtgtaagataatttaaacacctattgacgaatattgctcttaacctttccttgattacctaccttcaacctattttaatgcttaatactagttgttaagaaccatgtagtgattgtagatggaaatgcaaaaattcaggtatatttgctattgcattttaaagaaagaaagatcaatttcgtaacaaaaccaaatgtaggttaatgtgatattttggtaaaaaaagagtcaaatacatgggggcttaaacatcccaaagaatttgaatcttatccgaaaacgtctgagaagatttgccaagtagaaggcatgtgtgttggcagtgagtctaagtatcaatattcttttaggaaactttgcaccctaattaattcgaaagaatcagcgttcttcagttaaaatatacaggggcggtccctggggagggatgaagcagggatgattttctgtcctcatctgcaaccctaaaggtaagttctaaattaatgaaggattaaatttaaagccatttaagtctgttcatttgaattgttgaaaactgagaaatttgcatcatttaaaataagtgtctacagtactttaaaaaaatgtactgtctttatatatttatttatgggttcaaaaaagatttcaggcaactcacaagattgcgtaaaataaagtcatgctaaagtagcgaaataagactgggccactaaacagtagatgcacaattcctgcgggttaacttagtgctccaagtaaacttcggatttgccgcagcgccccctggaccccggagtgaaagggaggtattggcagctatgattctcactatcagcaaagaggacgcctgcgagtttctcagaagacactcagcatcagctttttcctgattgctattcttctgggcacttaggtttatggtgatggccaggacgagatgggagtcgtgggttatttccccaggaacttggtcaaggaacagcgtgtgtaccaggaagctaccaaggaagttcccaccacggtaagcatctcaaaagtgactagacaaggactcagatcttggggcaatgtaggccggtgttaaaaatgcatcatgcaacttacaagttgtatagaacaaagcctccaactttcagtggcgacttttctgagataatgaggtttgggggaccatttataactactgtcaaagttgaaagatgagtaaactttctctataccacccccttttgttttatttcagtttactactttttgtctcatcttttttctatattttttcagctttattgggttataattgacaaataaaaattgcatacatttaatgcatacattatgttttgatatacattgtgaaatgatcatcacattcaagctagttaacacatacatcacctcacatagttacctttgtgtgtgtgtgtgtgtgtgtgtgtgaaaacattaagatctgccctcttagtaaatttcaagtatacaatacagtacctcttttgttttagatgcaagttgtcttgcaaagcagtctatgtaacaaataaagaaaccaaagtcagcactgactcttacagatggttttcactaaagataggctgaaaaaaaattattatgtttttgatcaaatcgaaatattctagaacaatctttgaatgtcttatttttgtggtaaatagattctatttatgtatgaaataaagttatactcttcctaatgccctggggtcctgtaaactcaggacagaaataaaagatgctttctgagctactttgcaaggtgcttgttttgaagtgattcttctggagctaattgttgtgcttcaaacactgctcatcctacacaaatgggactcacttgtcatcacttcttagcattatgctgaaatctgtcagataactgcaaattaaaggttcattttaggaccttcattgtaagtagtttttgacttaaagtggtaaatatttcatattttttgggggtcaacctttacttactttaaatccaaatttctctgattagatatgactttaaatacagaatctacatctgtttttttagcctaggctatttcgttcaatctttttttgtttttgtttttttccaggatattgacttcttctgcgagtaataaattagttaaaactgcaaatagaaagaaaacaccaaaaataaagaaaagagcaaaagtggccaaaaaatgcatgtctgtaattttggactgacgttttaagaatttgttaccttacagaagagcaagggcttaggggttggaggtggcagataaaagaggattttcaactcaaatcttgtttcctgctggcctggtctgcccacgagctagagcggggaaatgttgagctcaaatgggtaaattgagaccagaaaattattttttcaacctagagaatctcctcttacagggggatgcatataacagatcatgtatgtgtagttatttctaagtagtaattcttcccagctctttgatttgccatatataaaataggtgggtcgtatgtcttccctttagacatgatgttttctactcatttgtctctctggccaattgaattattaataaaaggtctgtattatcaaagagtattctagtatttttgttacttttaatatttgatgccttttggaggtaaagctgttgggggaagaagagtttttggacccatagatgtttggatgatgtctctaatttgtcatttagaaaaatctcaaaaatgatttcagttgaataacttgccttctaaatgatcaatttacttctcccccaattttaaagaagtatgtgtatatttaataggggaaggtagtttatggaaatatttttaatggaatagttttcccttaatatgtatccttgctggatattattcaagctgcaagtcatcaaaagacccagaaaaaaaaaagtctgtaggttattttctctacttctatttcaactttgaatttcctcttcctgtgcaaattcctctagtcaagtgtgatatatcaagaaatctgaggaggatgcaggttttgtggtcctgatgggcccacaagtttttctatatttaactggaaatatgctttgattttgtgttattaatataattcttttgatgtagtcatgagtttttctttgtttgcatataattaaaatgcctctacttaatgtcacaattctgagttttttctaaaacatttttcaccttagagaatgaaagtgtgggggagttgggaatgaagcttgtttttcagttctctgtgatctggacatcccctaagcatgaagaagagagcagaagagggcatttagggtgagccacagacttggcccagggtcattttttagctctgtcagctgtgattttgggtgaatatctttttaccaaattcttatgtaggtcggtcaagtaaagtaccaaaatgcaaaacacaataaaataaaataccaatgtttatttgtttctattttactttattccaaagaggtttcaagtagcatctagggctctcgacacaactttagactaagaggtatttatcctacttctgcttctatctgcctctcacttcctggcctttccattccagaaacacccagaacacctgaggtgcccagcaaccccattgctcccacctggccttaggcacacagcttcactccccatgcatggggcttccagggcagaactccctccttaactcagtcagctccaacccatcaaaactgagctcatccaggagttggaaggtcattgactgatttctatcttctggggcctatctgcattaaaagaaagcaagcacttgcaggactttaaacattcatctgtcctctaaaaatgcaaatggccaaccctggaccagcagcagcagcaggtggtcctcacctgggagctggttagcaggcagaatctctgcccactgcatgccttctgtgtcaaaatatgcatttttaacaataactcagggggttcctgtgctcattaaagattgagaaacactgattttagttccctctactcatcttacagaaaaagaaataaacaaaaggctagagtatataggagatacagcaactctctccaaattaaacaacaggattgcaacattcctatcagtactttcccaaccctatcacagcactgtcttgattctccactgatgtctacccagagaaaagggggcagaatggtgccagggtgagagtttgtgggcagtgaggcctttgggactcctttccatttgatgaattgtttttctccctttcccactaagagaaagggcatcttcacacctctaaaaggttgtcaactgttaacataaaaagaattttagtctaaccctaacttgtaggcttccttgataccccaagctaaatgatatatatctatatctctctctatttatctatattaaatacgtatatattttaagcagcccaagtctttgccttagtttattaatcatgtaccaggtagttgggcctggccacttgagtacctgtgacccagctccattgtggagagtccccagctacgcaaactcattctgttttagccaagattaaacagaacaagggcgctgctactgtttatcttttagtctaaagatagttaatttcgtgtaggaagggcttaagttttactatgcagctcgtcctgcctccttgtgggagagaaagaagacatttaatcctccatctctgacctcacagagtatgggaagtaagacatctacctatagaagaataaagaaccattgcagagcagtggatgtggggaggaaaggcaggtaggtttcataagccagctaggggcaagtggtagactttgcctacagcagagcccttgcaaggcattaccagggcaggatgaggcaagttaagaaactgatcagaggtgagaggagtcagggcatggcacatgatagttggcaacaaaatgaaatcatgttgaaaggaaatgcgttgggtggcactggtggctcagaaaagcgaggtgacgataaaagatcccagggcatcttggagctttaaaataactgggctgccgttttctagctgtgtatacttagataaggttctgactataactgcaggaccagcccaaaccggacccactctgtcgataacaaaatgttgagttgtcttttaagtataacagagcccaaaactgcaagtcctattgcctaggcctgcacaatacaaaaagctttgacctctaacaatactcaaaaccaacaaatcctccctttggagccaagaagaccaggacaggactggaacatgaatgccagaacactttcagaagtgaggggtctgttggccctaaagatctggggttaaaatcctccttaacatacctttctgtaaatggtaaaatttaaagccctccaatcagacccagccaagccaacattcccaaatcctttctcttgcccactgtgatggttaatattgagtgtcaacttgattggattgaagggtgcaaagtattgttcctgggtgtgtctgcgagagtgttgccaaaggagattaacatttgagtcagtggactgggagaggcagacccaccttcaatctgggtgggcaccatctaatcagctgccagcatggctaggataaaaacaggcagaggaacatggaaggactagactggctgaatattccggctttcatcttcctcttgtgctggatgcttcctgccgtcgaatgttgggctccaagatcttcagcttttgaactcttggacttacacaagtggtttgccaagggctcttgggccgtcggccacagaccgaagactgcactgtcggcttccctacttttgaggttttgggactcaaactggctttcttgctcctcagcttgtagatggcctattgtgggacttcactttgtgatcacgtgtgccaattctcctagtaaactccccttcatatacacatataccctattagttctgtctttttagagaaccctgactaatatacccactggcccccagaatctcatgttcttctcacattgcaaaatacaataatcccttctcaacagtctccccaaattttaactcatcccaatattaactcaaagtccaaagcccaaagtctcatctgagactcaggccacattcctcccatctatgagcctgtaacattaaaaaaaaaattatttacttccaagctacaacggtggtacaggcatttggtaaaaattcccattctcagagggagaaataggccaaaagaagaaggcagcagaccctacacaattttaaaactcagtagggcagactttcaaccttaaagctccaaaataatccttgactccatgtcctgtatccaaggcacactggtgccaggggtgggctctcaaggccttgggcagctccacccctgtggttttgcagggtatagcccccatggatgctttcatgggttgaagttgagtgcctgtggctttttcaggctcaaggtgcaagctgctgttggctctatcactctggggtctggagggtggtggccccattcccacagctccactaggcagtgctccagtaaggactctgtgtgggagctccaaccccatatctcctctcagcactgccctagtagagtttctctgtggggctctggtactcctgcagcaggcttctacctgaccacccaggctttctagtaaatcctttaaaatccaggtagaatctcccaagcttccttcactcttttgctctgtgtatctgtaagcttaataccacatagaagccactaaggcttacagcttatgtcttctggagcaacagcccaagctgtatctggagccttctgagctgcaactggagctggaggagccaaggtgcaggcagcagcatcctgaggtggcacaaggcagcagtaccctgggcaaggcctctgaaaccattcttttttcctcctaggcctctgggcctgtgatgggaagggctgcctcaaaggttcctgaaaagccttcaagactttttgcctgttgccttgactattagcatttgactcccttttagtcatgcaattcactctagcaagggttgcttcccagcctgcttggattcctttcctgaaaatgcttgttccttctttaagaaatggccaggctgcaaatactccaaatttctacgttctactttccttttagttataagttccaactttaagtcagtattttgcttccatctgtgattgcaggttggtagatatggcagccatgccatatcttgaatgctttgctgcttagcgatgtcttctgccacgtacaccctaggtcatcatttttgagtttactcttccacaaatccctaggacatggacacagtgcagccaacttctttgctgggatgtaacacagatgtaacctttgctccagttcccactaaattcctaatttccatctgagaccttgtcagtttggccttcgctgtccatatttctatctacattttggtcagaactatttaaccagtatccaagaagttctaaattttctctcatcttcctgtcttcatctgagccctccaaactctaccaatctctgcctgttacccagttccaaagccacttccacattttcaggtatttttatagcaattccagactccttggtaccaattttctgtgttagtccattttgcattgctataaagaagtatcggagactggataattcataaagaaaagaggtttttttggctcctgattctgcaggctatataggaagcatggcactggcatctgcttggcttctggtgaggcctcaagaagctggtactcaggtggaaagtgaaaggagggcaagcatgtcatacagccagagagggagcaagagagaggagaggggaggaggtgccaggctttttaaaacaaccagctctcacacaaacaaatagagccagaactcactcattaccttggggagggcaccaagccattcatgaataatccacccccatgacccaaacacctcccaccaggccccgcctccaacattgtggattacatttaaacatgagatttggaggggacaaacatcaaaccatatcaccatcttagcaaggatcaccatcttagcaaggatggtgatatggtttggatgtttgtcttctccaaagctcatgtaacaacatctctgggggaaacaatctccaaaagagagtttctcaccacagtgtaagcaccttgagtttccatagcttgatgacaattgctatgaggacagaagtgtattctgtccctctgctttcttgatgctagaagtccaagtctctggttagaaattttgaacctcactctgataagagtcttgtgcaagatccaaagcacagtgaagacagaatgcctccatagaccacaacaggtgcccatctggagactgaggtactgtggcttttactcctttgtattagtctgttctcacgctgttaataaaggcatacctgaggctgggtaatacataaagaaaaaaggtttaattgactcacagtttcacacggctggggaggcctcaggaagtttacaatcatggtggaaggggaagcaaacatgtcctttttcacatggcagcaggagagagaatgagagccgaacaaagggggaagtcccttataaaagccttataaaatcatcagatctcatgagctagcgagaactcactcactatcacaagaacagtatggaggaaactgcctccatgattcaattatctccacctagtcccgcccttgatgtgtggggattattacaattcaaggtgagattttgggtggggacacagccgaaccatatcatcctctaaaaaagtatacatgggtgggggatgcatgccaatgagaagtttattctggatagattacgagattgcgtgattttatattggatacaactttgttaagtaatcctataataaatacgagtgatttgaataggctatgttttactggtttccttatattacgtaaatgtcagtggaatacatgaaatggggatcattataggtctcagaacttcaggaatttttccacattgtgaggaatgatggctcaggcttcttttgtttgtgggaccatgttcaactaaccacttgcttaccaattcacttatctaaaaaatgggtaatgcctttggagggtaactatctttgggataattgtgagcattaagttagatactgtatgcaaaatcacccagcacactacacagtacacggttgtatgtaataaatggtagtaaaattaaactttaaaatgagagggttttaaaacattttgaaatgtttgaagaactagacttctttttagtgaattagaagtatatcttgagcatcttttccttctagaacgctcttgcttttctccacagtttttttctgaaatggtctgcaaggcatgttactaatactttgcataacagtgaaaactctctttctctctctctctctgtttcttgacaaatgttattcttaatgtctgggtgggcactaggcaaaagagatcaaaccaggaaggtcttgttctcttatatgctcccatgttcctaccttaagtccttctctccctcagtctcttggatcctggaatgaataacattgcaaatggcaggaggccattctactctccctgctgtcctacacccagccaatggtgacttcactcgactttagccaattctgtgagcacttgtccttgggatgactaatacaaaagtggccagtgatccttttgaataaaacatttatagtgctgtagaaattattaataatgacctagtttatgggtctttacatctgcagaacacctcattttcagtgtatgggcttttgagttccctttcttggctacttcatggaaacaaaccttcaggaaatagcaggaaagagcaatttaaggcagggcttcgattacctgctgaaagccacttaagctcctccctgaagactgggcagcatattgttgctgtaatagcactccttttgttaaaagttatatctctttttcaaggggcatgtggttgaaactgctacttttgctttctgtaaaactgtaagaggtaagtcagaaatcagaatccccatcagatattaagattagaaaccaatcctttaaatgcctggccaggaattcataagatcctttctgaagcaggcctagcaagacttttttcagaattgctgtgtgaaatggcaaaatgaaatggaataactgaagtaattgttggaattgtcagtagagttttaccagaaacatttgggttattgtagtcaccatccccctacaatccctccttcccactcctgaactgcttttgtgaagacatagtctgtgtgaaaaatatttgagtcacagatgacttagttcattgttcacaatgaacattgtgactaaatttagcagcagtttttgtgcagtaaacttttagaacaccatggcgtatttcctaagcttagaagatgagagtgtcattctctctagcatcacccacttctgacctcagataaatggggcccatcactgcttctaaggtttattggctgaggggatgtgaatatcctcagggatcaggtttagtacagggaaatgtttagcttattcatgtagtatttaaactaatctctggaggaagtgggtatttctgctatgagtggagagaagaaataagatcaaatgcactgggaaaaaaatctcatttcttcaaccatcatcctcatctatctgaaaatggtggaaaaaataagaaaaaagctaataatcttccttatgataccactgaaacacaatttcaccacataaaggtcttctgggctgcatcccctgcaaataccatagtatatcagtaacttaatcagaaaaatgatatattgatccacacactttatataatctaccctctatgtaatctagcccattattaacaaagagaatgctccctgtcttttgatttaaatatttttctaaatggaaattacttttctgtcacacgtgagcaattgttttaatcatttttctcaagcgcacgctatgctaaagtcagcatgttgtgggggtaaaaaattagggtagtgctgctaataccccaccaattctccctccttccatctcttccaactctccctcccttttctctattcacttcagcttatgaatttacaatggccaaatgaatcagttgagatgagaatgctgatttgcttgagcaatgctatgttgaactgggaaaaaaaaaataaaaagccaatgttggggcttaggtttctacaaaccaaaggcagaaatcctgagtcacagccaggtttttcccccgtgaaacacccacccaggtgtgcaccctaccctctcactggatccattcatggcttgtcagatctcttccagctccttcgcctcccttgcccctcatgactctgaaataatttaaggatctttttatctgctcctagatctttccctgggctttaaattactactcttagtgctgctacaaatggattagcagacagattcaagcctggattcccaggaaccgcaagcagacacataggtttctgcaaaccactttagccaatgttgcgatggacagacacggagaggtcagctgagcctgctgaggcccaggaatagacttgcaataccggtctgtcctgcaggaaaatgccaaggggcacggaggctactctaggtaatatgtgttcccaaatcccacggttacctgaagcagccaggtagacgaccatgggggaaaaaaatcaaaagttttgagcatcaagtttaaaccagtgtcttgggtcagattccccagaagcagaccctgtaatgaggatttacgtacaatgatttgtcaaataatgactcccagggaaaataggtaaggcagagagggactgcaggacacggaaggggaggaatctcagacaagctgcaatctcaggcaaggtcctacagtggctggttggtgcctgatcccacaggggcctctgggagctggaaagttacatctcagagttgcctggacctaaggagaggaagctgagctttcttgtggcctgtcagttatggattcagggttttggtgagaaagcataatttttaggcagttttgcatatagataaagaggtctcaaggcagctggaagttctggcattggcaataaataccactgaagccaggaggtgtgtgaaaacactacaatggcattcaagggcatttgggtgttgcattgactttactagctccgcccaaggtggcttttcatttcatttcatttcgtcctttcacaatctagtccctgccacaacctctgtgggtcgggtcgctaatacagcctcacattttctccttgatttgcttctgctgaaactttctgctgtgcaagttagtcttaagtgagaagctttggtgggacaaggatgacctccagtggtcagtttgagatctggcatccagagagacatttctggactagaatcaacaacccagggtgtgagtggttctcaacagcatttggaattgtcactgtcagggctgccttctcaggtactctccatactccccctcactcccagcacacacgaatttaaaatctgcttgacacatggcatagatatgggtattaatatgcctttattgctaaccttatagtcactttgattgattctgaaaatacacatactaggggaaagctgacatttcactttcaaacctacttgtatgtttgttttgatatggagccctgcagagtttgtagatagttttagttgatttaatccatttatagaaaagcagcaatagcaccttgagctcagagagtagaaacttcctagaaaacaattaacacaacctgtagttccctccaggggcaccatggggtggctggaaggcacagaacctggtgtctcaagtcattcactctaggagcaggaatttgaagccagataacctggcttcaagacccacaacctgtccacaacaccctgccagaatatgattaaacaaacgtaaatctgggtttctacttcgtctaacagggtggttctcaactcagggctactttgacctctcattcctcccctcttcccctctccccagggtcatttggtgatgtccaaggacatttttgcttgttccaactgaaggggatcactactggcatctagtgggtaaaggccaaggatgttgctaaacaacctacaagcacaatacagctcctcacaaagaataatcaggacccaaacgacaatgtgccaaggttaggaaaccctactctaagagatgatattaatcaataggtgaattttgaaagaatgaagaatgatgaatgctggaggacctaaacaattatctgggtgtgcatttgttttctaagtccattctggggcatatttgctcactaacaagccactgggtagagctggtacctgaaaaataggtttgttcaggcttatcctggcacacatctcatcacactggccagagctgtcaagacagaaccttcatgctgcttgttgcaaatgagccctggtgattccctttctccatgattttaagcacgttccttttgcttcatgcttgagttgtgcacatcctggctcctgatttagcatttcaccaaatgcccttcatgtgctccagcaagcctcccagtgtgaagggttgacacatgatggggtctgaaggcttattttcatttcttcttgggtctgttttctgtctcctctaggagattgcttaattgcttttcaaacagctatcatgtgctcctagctttacagcttcttcccaaagatgattacaacatcttattatttttcaagtaaaaatagtgcttctttacccctctgtaatgtatgcagtgtcagtttcaatagcaccagctgtctctccccaacatggatctctttttttctttatttccccacctttgctattgtcatcctgtttaacctttctcagaagagcttcctaggcacacaattatatttatagagtctctgtgcatctgtggatacaattaaaatttaaacactgcatatttagtctaatgttgacactattcattttgtagagaaaaatttatttaagcgttaataactagatgtgcaaagtactttccagtgcatcaattctaagacagggagaaagagatcatgcagttctcatctattagaattgtgagtttgtttgaaatatatgtgtaattggagacccaaagcctcatttcaaacgtgctactttatctcatattccaagcatccgtgaacgtagatttttgaatgaatcctaaacttaatccctggtctaggccagcctgttactggttttgagtttgaatagggcttgcgtgacatttttttgatgtcgctatcaaatttaagtttacaataaataaaatattccccgcccttctcccaaaaacctcccaccctacatttttcaaaatagacaatctgaactaagaaagtaaaagatggctaaaatacataccagggattggaagtcggtttgatcaccccaaaccctgcactctctgccttcactgctcctgagacctgcccagggaggggcatccacaaggtgaaagaacccagtgggctgcaaactgtcaccttaattaaccattaggtaagcacccaaagatgccagcatctcccaaaaaagggcttctgtggcataggctggactcgatgatggggctcagcctgggaagtagacatgaggttttcttcttccggcttccttgaatctaagtcacctggtctgtgaaacaggattcagctagccatttagaccaatggctgatgctgtcaactacagatggagaaactaaagcaatagagaggaagaagattaggtgctattgatacctggtccacacctcccacatctctttgtctgatggcatttatggtcatcggagtttgctctattgtttcatggcagtttggaagtgcaggcaatgaacactcccctgggagggctcttaagcaatgattgacaggggttggtggataatactatattatcacactccaccctgtgaggggatacctcttaggtgtgcagtcttctctgtctcccagaggtctggagtgaattgagcttcagggacccacagagatggctttgctgataacacatccaccctttgtggcttttttctcttccctgcctcactttgccactctcctactgatgtttcttggaatcacctcccaaatacattatttgtactcagatccttatttcagtgtctgcttcttggggaagcctgtactaagaccaaatgtatgactgattctgtccttaataggcagatcctgtccgaagctgctgaaagcatggagcatgggaagcacctgggaagaacacctggcactcaaaagcacaggaggtgaaagaaatgtgtcgacctagctgcatgccctctcagccctgtagtgtccacctgctatggtttagatgtttgttctcacaaaacctcaagttgaaatttgatccccagtattggaggtggggcttaaagggaggtgttttggtcatgggggcaggtcgtacatgaatagactaatcccctcctttggctgggggagcaagtgagttttcattctattagtttctgagagagctggttgatgaaaagagcctggcacctcccctcttcatctttctttctctctcaccatgtgatttctctgcacatagtgaccccgtttcaccttctgccatgagcggaagcagccctaggctctcaccagatgcagacacccgacctggaactttccagtcaccagaatcatgagccaaacaaaccctctttctttataacctagcctcaagtattcctttataggaacactaaacagagtgagacactacccactagtggaacttggcccatgagtttctcagattctgatcaacagggtttccaattctttcttcactggggaagtgacagtggaaagcacagtagtaaaataattgcaaaatttattttcaggtttccatttcacactccacactccaaataaaagaataaacctgaaaaaaatgtttctcctcgctatagttcaggtttatcccaggccacttccacttcagagtagcagacacttcaagctgccctgggtcagaactctctgaaagcttccttgcaggaagaagaaatactatttgtctctatttcatattcaaagcttcttaccattcccagctacccgtcactttcaaattcatcaagctaggactgactattcaaacaagacagttctttaattcctcactttctggtaggaacatgactcagagctacgaaaaccttgtagtacaggcttttgggtgcattttattaaaaggtaagattatgctcgaagcaaaggttaggcaaacatttgcttaatgccttagaactcaacaaagagggaacattttctcaagtcaggaagctgaataaaatggctgctaggttgagaaaggtctttacttaaaggtcaaactaaaatataatgggaaagaaaaatagtttaaaatagtttttttttttttaaagggagactggcggttctaagtggagatttgcttcttctttcaaaatttcaaaaattcatatgtcagttttgaaacacaattattcttaaaaacaaatacataattgaagcagtgccactaaattggcccccagcgcagcctccaatttaaacaggaggcaagttctcaagcatttggaggtgccagccgccctccttcccagcaagacctaaccagctccttcacagcacctggcttctccaggcagctccatgttccagattgccagactgtgccctgtttgctgccatttcaccctttccatcagatcccatttcccaaggacacaactgggttgggaaatgcagcagcaactcgaactttttctggggccagaaacattacatttcacagatgcagctagcacagtgcctttctgccacagggaggaattgtggggctggcagggagctgggtgcaacacccaggtctgggaagcttctcaattttctggaagccccacatgtaggaggccaccaagatttcgagcaagcaccaggcaatacattcttgtttcatggtcaaatgaagagttggggatgctctttttttcccaagctcttaacgacgctctctaaatttcagcaaattttctcatccaaatctgacttaatcaaaccctctcaggaacttctttgtacttgttatattgtgtagaagtgacattttgaatatctggatttgatagacgttgttgcatctgtgagatgtatggaaggtagattaattctcctagatacatgggtactagttgtacccatatattttgaaacacttctttactagttggtaaatagttatttccctgaagcccccaagagtgttccttcactgccacacctgcctcataagtccctcccctgttatcacaaggacctcaaacagttagagggtgaatgcccggaagagcatctgtccttcaggactctgctctgttctaatgggctggtgcctgctctctctctgttgtactaattcagtgagactgtgcttccttctctctgggatctggttcttcacgacctcactgctttggtagctctctgaaagcacaaacatattcatatattttgtgcagcttttctgttttctcttattgagagagttggtaagtcataagccagtctatcaccactggcagctggaaccatcagtgtattatgtgaaacagatgtgtctctacgggttaagagtttgattacttgcagccaaatgaattcttaactgttaagcttgttacggccaggactgtgctatgtgtggatctatgctatgttgatgtgtgtaacgacttgggtgtatgatctaaaggaaagagactgagcaagctgccttgatcagagaagagaactataacaagcagactccagaacaaagtaaatacttagggtaatcagagaaggataatttggatttcttcattgagaaacaaaaggctaagagatccataaagtatactaacaggataaaacggttattagagagaaaggtttggaaactgctgaatggtaatatttctaagttaacaaattgctgaaactcaagaggaagtcattttgttttagctttgccattaagcacaaagccgaaacttttggcacatgatttataacactcagagctctgcagattttattaaaagtattaaataaagcctgaaacctcccaaggtgtcccacagcctgcaatatggagagataaagggctttttccatggtcagacattaggcatgggtataagtgattaaaggagacacacagttaaaatgcttatgaacgcacacatacacaggtatttggtaggaatagcctgtctaaatctcatgccttctgtgacacattgaattttccaaatatggccctatcagcatgttccatcacccatgttccttttcttggcactgggtgggcctgtgactaggtgaacaggatactgtgtgacttctaagaataaaagtcctcggagccatacaactttcagtagccctcttggaactcttgaccttggatcctgccacccaccacatggaaaggccactataggctgttctggccacaggccttatctgaggtcctagatgacagctcacattggccacccattatctataccatctgcagcagccatatgagtgagactgcagaagatccctgccccagtctttgagcatgccacatggagctgagatgagctgtccccattgacaaaactgctttttcagattcatagggaaaatacatgctttaaaccactaagtttaggagtggtttttcatgcagcaacagctaactcctcttccctatatctgagtgtaatgcttatgagagttgctgagatatcgcttaagacagagaaagaacctggagagacatagagtgtaccaggaacattagctgatccaacaaacattaaaggcaaagctctggcttaataaagcctctatctagatctggcatgaggtctttccttgtggagatgattggcagaaatataaaggcagttctggccccaacctttaaatgatactggttttaaggtccctgggcatggcttttttgagaaaaaaattaaagataaaagtaaaagggtatttgacagagaccaccaattgaatccccaaatttgttttctccttcatcctttagtagtagtaagttcctgaattttagcaatgcacagaccactcagaatcaagattcctatttcaggtgcttgtgatgcttcatgctgctgccctgcagtccctgtaacctcatggcagccctggacgacaagttcaggcatcaggcacacatggagtctttctattctttcttctctgaagctgtggaaggacaagtgtgggcataacctggacctgtagggacaactgccctcggccaatgggggatggtagtgggtggatagaggccgccacctcctcttccttagatggactaattctgagctgtgttctacaaggttccccaaaggcctcctgtgggattgaaccccagatgcctagagcagcaagaagctcaatgacactccctctactggcttttcttcttcccttgactcacttttattactcagtcacttctatattttggaagtatctcctaagtaaagtacttgtgcccaagtccttatttcagggtctgcttttgaagaaaccccaactaacacaattatgtttcccagcttttcttgcagccagatgtcactatgaaactctgatctgcttccctgtgctgttactctataaattgtggtgactcttttgtttcccttagtcaacagtgctagaatatggcctgttgtctcaactttcttagtatagcagttaagattttgaactttagagccctagagccagatttctagggttcaaatcctggctcagccacttgtcagctgtacgatctttggatggcagcttaatcttgctgtgtctcagtttcttcatttgtaaagaaaatatatataatgatgataatagtaatcttgttgtgggtgctaagtaaggaaacatatgtaaagtaatgagaaaaatgcctgatagattgtaatagtctgttttgtgttactgtaatagaatacttaagcttgggcaatttataaagataagagatttattcagtttatgattctgtaggctgggaagttcaagattgggcagctgcatctgctgagggcctcaggcttccactcatggaagaaagtggaaggggagcgggcatgtgcaaagagatcacacagtgagagaggaagcaagagagacaaaccaaggaagccagaacctttttaacaacctggtctttcaggaactaattcattcttatgagaaccagaactcacttacccctgcaggagggcattactctattcatgagggatccacctcctactaggtcccaccttccaacactgccacattgggatcaaatttcaacatgagttttgttggggacaagccacatccaaaccatagcataatgttaaatcataaaaatactgttatatatattcttaataaaatatctaaccacttcttgataaataaaaatggttgattcccatacttgcgcccaggtcaccaaagtgtgaatgatttggagaccaaggcaagaactctggctctggaatcaaatcaggagaatgccctaattgcgactgtactgctattgttgagaagacaacttgacaactcactgttggtgaagtaactttctgaagacttgaacctcatgcatttcctccagaaacagacacaagtggaggacccaaggttagggatgaggagcacatgatgatagggccatgtggcacctcagggacttgttaatcggtcatgtaattaggagcctcttgcttggctctgcttgcattaatgtttgtgtggtttgtaatgtctgtgtaatgtgagaagagacaagccaaatagaaaataaagatggtttcttgcttctcatgagatgcttataccttgtccataggcactgagacacactcattcagcttaattttaagaaggcttatttcgtgtctatattaaacccatcaagaatctcagcttaggatccctaaactgaaaatgaaactgtcattggatagatcttttaatcttggaaacaaatttggggaaagaaaagcctttttttaaaggcggaatatgttttgaaaatgttgcagacagggctacaagacatgaacaaagacttaagtatcaaaagataatattcactctgtgttcctagtttggaccactcagaaatttccatctcaagagtgattccttttcaatgaggagttggaaaaagctaattaggtgaatggggttctattgtttttgtcatgtgaaaataatggattcatttttaatgcttttttaatgataattaaaaacatagcatacttgctaagtgtcagtactgccttgcctcattgaatctcaaattgatctgatgagatgaacaattttattttcccatgttacagatgagagtattgaggcatagagaggttaagtaacttaacaacaacaccaaactaggatttgactttggataatctggctggaagctcactatcataacaatcatattatgagacaactgtggctcaaagtttaaattcgtttattatatttcctgaaaaatctaaaatttggaatttgggactttaaaaaacttttattcctaacagacactgatggtcttctaattgttttctcctctatgttatattcatttttactctctgtttttctaattgaaattagaaataaaattcttataactgaaaattcaccattttaactattttaagagtataactcagtggttatactcttaaaatttgtaatattatgcaatcattgctaacatctaattccaaagaatatcaccccaaaagaaaaccctgtgcccattaaatagtaactctccattctaccttccccttagcctctggcaaacttagtgtactttatgtctctacggatttgcctattctgtacattttctgaaaatggaattatataatatgtggcctttttagcctgactttttttagcttagcataatatttcaaaggttatctatgttgtagtatatattagtacttcatttcttcttatggctttataatattccattgtatggatatgacatattttgttatccattgataagttatggggcattggctgtttctactttttggccattatgagtaatgcttatgtaaacatttatgtacaatttttatgtagacatatgttttcacttctcttggatatacatataggagttgaattgctgagtcatatgatgatactatgtttaactttctgagaagctgccagaatattttctagtggctgtaccattttataccctcatcagcaatgtataagggttccagatcttttctaacacttattattttgtcttatagccattctagtggatgtaagtggtatttcattgtgattttgatttgcattttcctactgactaacaatgttcagaatattttcatgtgcttattgctcatttgtacatcttctttggagaaatgtttattcaagtcccattctcatgttttaatgaagttgtttgtctttttgtaagagttctttatacattctggttactagacccttatcagatacacggtttgcaaatattttctccctttatgtggattgtctttagacctcttagtagtgttctttgatgcacaagacattttagttttaatgagtcaaatttatctcttttctttgttattgcttgtgctttggtgttgtagttaagaaaccatggcctaatccaaggtcataaagatttgcatctattttttccttcgaagagttttatcactttcattgaggtctttgattcattttagttatttttttatatgatgttgaggaaggggctcaaattcattcttttctatgtggatattcagttgtcctagaaccattgttgaaaagaatagtctttcctcatgaaatgacttttgtatccttgttggaaatcacatgatgtatgggtttatttctggattcttgattttatcccattgatacatatgtttatcctcatgccagtaacacatttttgtttaccgtatctttgtagtaagttttgaagccagaaagtatgagtcctccaactttattctttttttttcttttttgagatggattcttgctctgtcacccaggctggagtgcagtggtgtgatctcggctcactgcaacttccacctcccaggttcaagtgactctactgcctcaacctcctgagcatctgggactataggcgcccgccaccacacccggttaattttttgtaactttagtagagaaagggtttcatcacgttagccaggatagtctcgatctcctgacctcgtgatccacctgcctcggcctcccaaagttctgggattacaggtgtgagcaactgtgcccagcccttccaactttattcctattttcaaacattattttagctatttgtattatcctatgatttcatataatacttaggattagcttgtccatttctatacaaaagaaacctggaattttgataggaattgaattgaaaatatagataagcttgggaagtattgccattttaagaatattaagtctttcaatccaggattatgaggcttttctccaagttgtttaggtcctctttaatttcttcggacaatatgttgttgttttgttctaaagtttttgcaattactttgttacatttattcataagtactttatttcttttgatgatattgcaaatggaatttaaattttgtttgttcactgcaaatatatagaaatcaatatttgaatattgatcttgcaacctgcaactttgccaaactcactgatggtttggatatttgtcccctctacatctcatgttaaaatgtaattctcagtgttagaaatggagcctggtgggagataattggatcatcgaggcagatccctaatgaattctttaacaccatccctttggtaataagttagttcttgctcagttagttcatgtgaaatctgattgttaaaaagcatgtggcacctcccgcctcactctctctttctccagctcttatgatgtgatgcaactcttcctcctttaccttctgccatgattgtaagcttcctcagaccctcagtagaaacagatgctggcaccatgcttactgtacaccctgcaaaactgtgagctaactacacttctcttctttataaattacccagtctcaggtattcctttatagtaaagtcaatggcctaatacagaaaactagtattgaagagtgggacattgctatgcagatacctgaaaatgtggaagcagctgtggaactgggtaatggacagaggttcatagagtttggagggctcagaagaagacaggaagatgagagaaagtttggaactttttagagacttgttaagtagttgtgaccaacatgctgatagggatgtgaatagtgaaggccaggctgatgagatctcagataaaaatgagaaacttattgggaactgtagtaaagatcacctgtgttatacctttgcaaagaacttggctacattgtgtttatgtcctagggatctttagaagtttgaacttaacagtgataacttaggacatatggttgaagaaatttctaagcagcaaagcattcaaaggcattcaaggtttggactggctgcttctaaaatgctatattcatatgtgggagcaaagacatgacttaaagttggaacttacatttaaaagggaagcagagcataaaagtttggaaaatttgaagcctagttatgtgatagaaaagaaaagcccattttctggggaacaatccaagtgagttgtggagtattcacctgctagagtgattagcatgactaaaagggagccagatgctgatagccaagacaattagaaaaaagcctggaagacttttcagagatcaatgaggcagcttttttcatcagaggaaaataggcctagaaggaaagaataatttcttaggaaccctaatttcctagggttctgccaccctgtgcagcctcaggacactgctccctgtattcaggctactccagcctcagcctcagatcaaaggtccccaggtacagcttgggatactgcttcagaaggcacaagctataagccttggtggctttcatgtggtggtaagcctgtgggcccacagaatacaggagtgatgaaggcttggtggcttccacctagatttcagaggatgtatcagaaagcctgggctgggcatggtggctcatgcctgtaatcccagtactctgggaggctgaggcaggtagatcatttgtgatcaagaatttgataccagcctgaccaacacagtgaaaccctctctctactaaaaatacaaaaaaaaaatattagtggggtgtggtggtgcacgtctgtagtcccagatacttgggaggctgaggcagaagaatagcttggacccaggaagcagaggttgcagtgaaccaagattgcagcactgcaactccagcctaggtgatggagcaagactctgtcaaaaagaaagaaagaaagaaaaagagagagagaaagaaagaaataaagagagaggaaggaaggaagggaggaaggaagggaagaaaggaaggaagatagaaaagaaagaaagaaagaaaggaaggaaaggaaagaaaagaaaaagaaagaaagaaaagaaaggaaggaaggaaggaagaaaggaaagaaaggaaaggaaggaaaggaagaaaggaagaaagaaaaaagaaagaaagaaagaaagaaagaaagaaagaaagaaagaaagaaagaaaaaagaaaagaaaagaaaagaaaagaaaagcaaaaagaaaagaaaaagaaatcctgttgtccaaaaagaagactgccacaggggtagaggccccacagagaaactcaactagagcaatgctgatggaaaatgtggggctggatctcccacacagagtccccattggggcactacctagtggagcagtgggaagaagaccactgcctttcagaccccaaaacagtagatccattggtagcttgcatctggagcctggaaaggcttcaaggactcaattccaacctgtaagagagctacgtgggctgcatcctgcaaagccacaggggtggggctgcccaaggccttgggagcccactcttcacatcaggatgtgggatatggagtcaaggattatgttggaactttaggatttaatgcctgctctgctgggtttcacacttgtgtgtggtctattattccttccttttggacaatgtctccctcttggaacaggaatgtttacttaatgcctgtatcattattgaaacttggaattaaataacttgttttgattttacaggttcataggtggaaggagatgagtctcagatgagacttaggactttggatttgatgctggaatgggttaagactttgggggtctgtttggaagagatgattttattttgcaatatgagaaggacatgagatttgggggactgggggcagaacgatatggtttagttatttgttccctctaaatttcatattgaaatgtaatccccagtgatggaggtggggccttgtgggaggtaattggatcatgggagtgggtccctcatggatggtttagcaccattcccttggtgatatgttagttcttactcatgcaatatctagttgtttaaaagtgtgtgaaacctctcccctcattctctcttgcttctgctcttgccatgtgatgtgcctgctcccccttcaccttccaccatgattgtaagcttcctcaggccccagcagaagcagatgcttccaccatgtttcctgtacaacctgcagaattgagagctcattaaatttctgttctttataaattacccagtctcgggtgttcctttatagtaatgcaagtggactaatgcacttacttattagctctaatcattttttcatgaatttttaaaaagtattatttctatataagatgatgtcatcttatatgtagaaaagacatagttttacttctttattcccaatctgcatgtgtctttcatttctttttcttgcctaatggccctggctagagcttcaaagacaatgttggatagaaatagggggagtagactttgtctttttcctgatcttaggaggaaaccattcaattttgtcaccattaagtatgacattagctgcaggtttttcattgatgtcctttattaagttgaagaaggctccttctattcctagtttgttgagtttgttgtgtatttttacagtaaaaggttgttgtatagtaaaagggtggtgtatattttctgtatcttttttaacacactggtcaagtgctcttgttaaaattcaaagtagaccatgctactcttgtgtagggatatccaatctttcttagattaaaaccaatgtcctcatcattgcttacaaggaactaaaagtttggtcttcttatccctctgatatcgtctcatttttctcttttccatgctctctcctttccatttacaatgaccttctcattgtttttcaaacattctgggaaagtgtctttctctatgctgcattgtttttgcttgaaaccttcatccccagagatcctgttggtgaagttcctctccttcctgaaatctttgcccaattttcaccttctcattgaggccttccctgacccctttatgtaagtttgaccatcttcacaacattctgaaaccttcatattctatccagctttattaataattgttatcttctatgtgctgcacaatttatttgtttattgtgcttattgtctactctctatttcctccagtagaattgaagctccaccagggcagggatttctatctgttttgctcactgaatgtaaccttaatacttagaagaaggtctgagacatagtaagtgctcattttttgggtgaatgttctaggcaatagcgtgttggtaaatgtttaacaacaagctcttcaggagaaaaaacaaaccctgatttgtagcatttgtcaattttcatggtgcaaatactcccacccttgctgatttcaagctaccaacaagatgttactgagtgaagagttaggaagatgtgaacacagctggctttaccagcacaacactggtcctgcgccaaggataacatatggaatttatctcctgtgaaaactctgatcaactggcagagtctgtatagacacattgttgaaaaggatactgaaacttggcccaggctctgcaggaaaatgtgtcccaataattgggaatgctgcatagacataggaagggcatttgtcattccattttagaaaatttatttaggaaagagataatggggatcctgaaatatctttatttttccagtttgctttttgccccttttaaaatgttttctctcttcttacaagcccccatgttgtcagctgtaccacagatgagaaattttcctaatgggagaagcatttatttatacaaaaaatagttttaaaatacttttaatttctaagccagtgaaatactgtgagtatcatggttattgtggcagtattcgttgtataggaactcttgtagaggtcaagtgtttgtgtcaagcaactgtcaaatcaccatctccatttgttttgtgagttagaaatgccttcaaaagtggatgattctttttcttttttctttttctgttttgatgaatgagtgcctgaaaagctaaggaaaacatttatttgggatctcagagtacatggaaaaccttcaaaataacataatgaagtcctactattttggtaaattggctgcccaggtagaagagaaagcaggtgagacataaaagagataggcagccctttaggatggcactgccacaggcatcagccagcaggtggtaaaggtgctgccccccaggtctccagatagcaaatagctggttaggaagctgattgatgagcctcctgaaaagatgaaagagaagggaaagagaaaggaggtgatgacagtttctgatgttataatttttatccctaaaagcagaacaaagactaaatttatagttcttttaaaaatatgcctctttcttcttttattttactactagggattgggtagaatttatttgactctatttgagatcagagaaggccatgcatagaaaatggtagtggatgaacccacagttgctccaacatttttttcaacaaatgcttattcaacaaatattgaatgagcaggtacgctgtgtgccattcttctaggccctaaaaatatgatggtagaaaacagtccaaactgttaaagcacaaccttattgaaggtaaaattatgactcttcaagaaatataaaatgagactgggtctaagattttatttaactgatttattaatgagagaaccaataacatactaccactggttcaaaagagaattacaagaacttaatgtatataagtagtaaggaatgctgaaaagaattttcagatggatgcagaattgatctgtctatagggaatagctaattacattccacagaacataaatcatttgcacttctatggacaaaaatcatttgttttattatcagttttctacaacttacagagttataaactacctcaaagtcaataaaaggcaggcaattccagaagcaggctctgaaaggacaccgggaatctgcatttctcctatttcaaagtatgacatgattttctcaagtaacactcagtaaatatttgatcaatgaataaatagtgaaccagaaacaaaggaagagcatatttcaagaagaaaagtgtgatcaactgtgtcaaatgctgctaagagggcaggaacgatgagaattaagaactgatcaccgatttggtaacatggaggcttcagtggaattcggggaggcaaaagctcaattagagtgggctcaagtgccattggaaactgaggaagcagagagaactaggccgttgtttgggagtagctttaccagaaaagggaacagagaaatgagggtttagctagcggaaaacatgaagtcaagggaaaacatttgatttattaatttattttcttttttaaaattttttttattgtactttaagttctagggtacatgtgcacaatgtgcaggtttgttacatatgtatacatgtgccatgttggtgtgctgcacccattaactcgtcatttacattaggtatatctcctaatgctatccctcccccctcccctcaccccacaacaggccctggtgtgtgatgttccctttcctgtgtccaagagttctcattgttcaattcccacctatgagtgagaacatgtggtgtttggttttttgtccttgcgatagtttgctgagaatgatggtttccagcttcatccatgtccctgcaaaggatatgaactcatccttttttgtggctgcatagtattccatggtgtatatgtgccacattgtcttaatccagtctatcattgttgaacatttgggttggttccaagtctttgctattgtgaatagtgccacaataaacatacgtgtgcatgtgtcctttatagcagcatgatttataatcctttgggtatatatccagtaatgggatggctgggtcaaatggtatttctagttctagatccctgaggaatcgccacactgtcttccacaatggttgaactagtttacagtcccaccaacagtgtaaaagtgttcctatttctccacatcctctccagcacctgttgtttcctgactttttaatgatcgccattctaactggtgtgagatggtatctcattgtggttttgatttgcatttctctgatggccagtgatgatgagcattttttcatgtgtctgttggctgcataaatgtcttcttttgagaagtctctgttcatatcctttgcccacttgttgacagggttgtttgtttttttcttgtaaatttgtttgagttctttgtagattctggatattagccctttgtcagatgagtagattgcaaaagttttctccctttctgtaggttgccggttcactctgatggtagtttcttttgctgtgcagaagctcttttgtttaattagatcccatttgtcaatttttggcttttgttgccattgctttttgtgttttagacatgaagtccttgcccatgcctatgtcctgaatggtattgcctaggttttcttctagggtttttatggttttagatctaacatttaagtctttcatccatcttgacttaatttttgtataaggtgtaaggaagggatccaatttcagctttctacatatggctaaccagttttcaagggaaaacattttaacagatgaaagataattcagcatttagtatgctagagataaattgataaaatagcaacagtagggagggaatgactgtgagagggaaggtcatgagtaggtgagagggaagcatgtgcagcttaagtggagaattgcctgaggtcaaagaatggaaaattcatctgttcactgggagttttcttcttctgtctgaattaaaaaacaacaataacaacaaatctaaatctgaaaataatttaagaagagccaccagacataccccacagaatttactaaaaggtggctaaagcaactctacatggtggctgtcatctcatccctacttggggactgtgctgtgtaatatggtagctaccagccagatacagctatttaaataaaaattaattaaaattaaatacaactgaaattttcagtttctcaatcattctaactatatttgaagtgctcaatagccacatgatgttagtgctattgcactggacagtacaaacgtagcattattttcagcatcacatgaagttctgttggaaagaacagaagattaatctcctgttaatagcttctctaataatatcagctcttctctttcatggcacagattttcttccaatgtctatttacatttggatttcattagcattttaaaataaaaagcgggaaaatggcaacttgatgaatatggatgagacattgtctactcaactttggaatgagaataatatataattatgctaattttctgtggtttagaagcattggtggagaattgctatagtaggcagtcccccatctatgtgtaaagtgctatcattttcccctattctgctgcttcaattttttccccccaactgtatatttaggcatgctttaaatatgtttctctgtcctgggctgatttgagcagaaaagaagctagagagatggtaggtggtgagagaacaaggaaatagcagcaagactacactggagagtccttcttttccaactgcccctcaaatatggattagtgcaaacttcatagatgtattggtatgtgctgattctctttcagcttttaattccttgaattatcttttcattacatgagtaaacacataaacacatttaaaaaaataaattttaaagttttttcttattccttatatttattgtcatttatcttacacagaaaactaatttgagcatcatcccatgatgtcattctttttcatggctgtgtggtattccatggtatatatgtaccacatttttttaaatgcagtccaccattgatggcctctaggttgattccatgtctttgctattgtgaaaagtgctatgatgaatacacgcatgtgtgtgtctttaaggtagaacaatttatattcctttgggtatacacctggtaatgggattgctgggttgaatgataactccattttaagttctttcagaaattgccaagctgatttctacagtggttgaactaatttacactctcaccagtaatgtgtaagtgctccctttgctctggaacctcactgacatatgttattttttgactttttaaaaatacccatcctggcctggcacagtggctcacgcctgtaatcccagcactttgggaagctgaggtgggtggattgcctaaggtcaggagttcgagaccagcctggccaacatggtgaaactcagtttctactaaaaatacaaaaagttgccgggcatggtggtgcacacatatagctacatctacttgggaggctgaggcaggagaattgcttgaacctgggaggcggaggttgcagtgagcagaagttgtgctactgcactccagcctgggtgacagagcaagccttttctatctcttgcttgattgctctggttagtacttctagtactatattaataggagtggtgagagtgggcatcctcatcctgttctggttctcaagggaaatgcttccaggttttgcccattcagtatgatgttggctgtgggtttgtcatagatagctcttattattttgaggtacatttcttcaatgccagtttgttgagggtttttaacatgaacggatgttgaaaaccttttctgtgtctattgagatgtgctttttgttttaagttctgtttataggatgaatcacatttattgagttgcatatgttgaaccgaccttgcataccaggaataaagcctacttgattgcactggattagctttttgatgtgctgctggattcaatttgctagtatttcactgcatctatgttcttcatgggtattagcttgaagttttctttatttgtggtctctgccaggttttgatatcagaatgatgttggctcatagaatgaattagagaggagtccctcctcaattttttgtaattgtttccgtagaattgatatcagctcttttatgtatgtctggtagaatttggctgtgaatttgtctgttctagggctctttctggttggtaggtttttttatgactgacttggtttcagaactagttatcggtcttctcagggtttccatttcttcctagctcaatcttgggaggttgtatgtttctaggaattgattcatttcttctaggttttctagtttgtgcatagaagtgtttgaattagtctctgagagtttttatatatttctgtgtgatcggtggtaatgtcatcttcatcatttctgattgtgtttacttgaattttctcatttttctttattagtttagctggtggtctaacagtcttatttattcttttaatgaacaaacttttggtttcattaatcttttgtgtgaattttcatgtctcagttttgttcagttcagctcggattttggttatttcttttcttctgctagcctcagggttggtttgctcttgttttttccagttcctccaggtgtgatgttaggtttttaattcaaggtctttctaacttttcaatgtaggcatttagtgttataaactttcctcttaacaccatgttagctttgtcttagagattctggcatattgtatctttgttttaattagtttcaaataatttcttgacttccgccttaatttcattctttacccaaaagtcactcagaaacaagttgtttaattttcatgtaattgtatggttttgagaggtctttttggtatttatttctatttttattgtattgtggcctgagagtgtggctggtatgataatttcttttttaatttgttgagttttgctctatggctgagcatgtggtctatgtgagagtatgtgccatgtgaagatgagaagaattatgttctgttgttgggtggagtgttctgtaattgtctgctaagttcatttgtttgagtgttgagtttaggtcccaaatgtctttgctttgtgcctgatgatctgtctaacattgtcagtgggatgtttaagtctcctactattgttatgtagttatcttagtctctttgtaggtctctaagagcttgttttatgaatctcagtgctccagtgttgggtgcatatatatttaggatagttaaatgttgttgttgaattgaagcctttatcattatgtaacgcccttctttatttttttgatcattgttggtttaaagtctattttatttgaaataagaatagcaactcctgctcttttttattttccatttgcttaatagacctttctctgtagctttactttaagcctatggttgtcactgcatgtgagatgggtctctttaagacagcatacagttgattcttacttttatatccaacttgacactctgtacatttaagtgggggcattcagcccatttacattcaaggttaatatttatatgtgaggcagatcttgtcattttgttgtcaactggttgttatgtagacttgattgtatagttgctttttagtgtcagtgggctatgtacctaagtgtgtttttgtaatggcaggtaatagtgtttcatttccatgtttagcaccaccttaaggagtgcaggggttgctatttttattttaggcgaaacagactttaagccaacaatggtcataaaggacaaagaagggcattacataatgatagagggtttgattccacaagaagacctaactattgtaagtacatatgcacccaacactggaatacccagattgctccttaagttccgttacctcttgtaaaccagatctggtggtaagaaattaccttaatttacttgtctagaaaggattttatttgttctttgcttatgaaggttagtttggctggataggaaactcttggttggaatttttttctttaagaatggtaaatataggcttctaatctctcctggcttgtaaggtttctgctgaaagatctgccgttcacctgatggaattccttttgtatgtgatctttcccttctgtctagcagcctttaatattttttttttcatgttggccttggagaatctgatgacgatatgtcttggggatagacattttgtatagtatctcgcaggggttctctgaattttccaaatttgcatatcaatctccctagtaagattgggaaaattttcatggataatatcctcaaatatgattttcaaaatgcttgccctcttttcctctctttctgggatgccatgcattgtatgtttgatctctttgcataatctcatatttcttggagcttttttctatgttttacattcttttttctttatgtttgtttgatggagttttttttttcttttttttagaactggtcttctagctcagagacttttatcctcagcttggtctattttgctgttaatacctctaattgtgttataaaattcttgtaatgaattttttaagctctagaggatgttttgttctttcttaaaatggctattttgccctttcagctcttgtattgttttactggattccttagattccttggattggtttcaactttcccctgaatctcaatgattcttgttgctatccagattctgaattctatgtgtgtcattgcaaccattttagtctggctcagaaccattgctggggagctagtgcagtcatttgaaggtcagaagtcactctgggtttcagagttgccagagttcttgtgctggttctttatcaatcgtgtgggctgatgttcctttaatgtttgaagttgctatcctttggatatggctttttgctcttacattctttgataccctttagggtttaactgatatataagttggacttagttgattggcttcatttctggatgactttagggggccacagcactcctgggctgtgtgtgctaacactgggtggctgagaccagacacttggttttttctctggcttcttgaggttaagcaccctatgtgctggaggggttaaggtgtttccagtttgttgacaacaacactctgataaggggtgacagcaatatcacatcagtgggtgatagtgaggcaggaggaatccctgcaggtgagtcctgcatgtgtgtgcaggcagagggtagcaaatatttatctatttattatgtttattggtaattttcttcttcctttataaaatataatacccatgaagtcaggaatatttgactatttgtttcttgcctgatacttggtatatacttaatacttattaaataaatgcatacataatttaaaatcagaacagcattaaaaaaacttttggaaaataatataaacaaccagatcaggaagtagaggtccaagtatggaggaagctgaaattcggcatgatttttaagaaatagtagaatgtaataagggactccattaagcattgatagttgtgttctctacttacaagagtcatgaaataggaaaaaatagagatggtatactacgtggcctctgatgaaagaaaaacagttgtaattatatagatgcttatagttttacacttttagaataaaatatgcaaaaagaataaaaataattagggctaataccagaatattaatattaccaatcttgatagtgtaaatctataggtagggggattgggaaggtagaagaaggtaaggtggaatgaattaaaatgggcctaatatcttcatcttctaataagaggaactaagatatacttttgaaggtttatagaacaagaaaatgtcttttaaaatgcaaatatgtttgccaaattttactcacttgagttttactgtatcttacaaaatctgtattttatttacttaaattttcttttgtttaaaataatttatcacttaaacacgtttttataatcttcatatcagtgaaacaaaaacctcattttttatgtaagtaggagttatttataacaacagtaagttgatttaattaattctatttatttatatttgaaacgaagtttcactctgtcacccaggctggagttcagtggcgccatctcagctcactgcaacctctgtttcctgggttcaaacgattttccagcctcaacatcccgagtagctgggattacaggtatctaccaccatgtccggctaatttttgtattttagtagagatggggtttcacgaagttgaccaggttggtctcgaactcctgacttcaagcaatctacctccctcggcgtcacaaagtgctgggattacaggagtgagccactgcacccagccaatttattttttattattaacaattttttaatttttaatttttgtgggtacatagtaggtgtatgtatttatggggtacgtgagatgttttgatacaggcagagaacatttatcttattttattcatttatttttaaatttattttttatttcaataggttttttggggaacaggtgttgtttgattacatgaataagttctttagtggtgatttctgagattttggtgcatgtatcacccaagcagtgtacactgtacccaatgtgtagtcttttatctctcaccaccctcccaccttttctcagagtccctgaagtccattttataattcttatgcctttgcgtcctcatggcatagctcccaattatcacggagaacatacaatatttggttttccattcctgaggtactttgcttagaataataatctcaaatttcatccaggttgctgtgaatgccattatttcattcctttttatgcctgagtagtgttcaatagtatacatctaccacattttctttatccacttgttgactgatgggcatttggactggttccatatttttgcaattgcgaattgtgctgctgtaaacatgcatgtgcaaacatctttttcgtataatgacttcttttcctctgggtagatacctagtagtaggattctggatcaaatgatagatctacttttagttctttaaggaatctctagattgttttgctttttctcttttttcttctttttttattattatactttaagttctagggtacatatgcacaacatgcaggtttgatacataggtatacatgtgccacgttggtttgcttcacccatcaactcgtcatttatttctcctaatgctatctctcccccagcctcccaccccccgacaggccctgtgtgtgatgttccctgccctgtgtccaagtgttctcattgttcaatccccacctatgggtgagaacaatgagtttggttttctgtctttgtgatagtttgctgagaatgatggtttccagcttcatccatatccctgcaaaggacatgaactcatccttttttatggctgcatagtattccatggcgtatatgtgccacattttcttaatccagtctatcattgatggatatttggattggttccaaatctttgctattgtgaatagtgctgcattaaacatatgtgtgcatgtgtctttatagcagcatgatttataatcctttgggtatatatactcagtgatgggattgctgggttaaatggtatttctatttctagatccttgaggaattgccacactgtcttccacagtggttgaactagtttacactcccaccaacagtgtaaaagcgttcctatttctccacatcctctaaagcatctgttgtttcctgactttttaattatcgccattctaattggcacgagaaggtatctcattgtggtttcgatttgcatttctctgatgaccagtgatgatgagcatttttcacgtgtctgttggctgcatttcaaatgtcttctttgaagaagtgtctgttcatatcctttgcccactttttgatggggttgtttgtttttttcttgtaaatttgttcgatttctttgtagattctggatattagtcctttgtcagatgggtagattgcaaaaattttctcccattctgtaggttgcctgttcactctgatggtagtttactttgccgtacagaagctcttttgtttaattagatcccatttgtctattttggcttttgttgccattgcttttggtgttttagtcatgaagtccttgcccatgcctatgttctgaatggtattgactaggtttccttctagggtttttatggttgtaggtctaacatctaagtatttaatctatcttgaattaatttttgtataaggtgtaaggaagggatgtagtttcagttttctacacatggctagccggttttcccagcaccatttattaacaggagatctttccccatttcttgttttcgtcaggtttgtcaaagatcagatagttgtagatgtgtgaggttatctctgaggcctctgttctattccattggtctatatatctgttttggtaccagtactatgctgttttggttactgtagccttgtagtatagtttgaagttaggtagcatgatgcctccagccttgttcttttggctcaggattgtcttggcaatgcgggctcttttttagttccatatgaactttaaagtagttttttttccaattctgtgaagaaagtcattggtagcttgatggggatggcattcaatctataaattaccttgggcagtatggccattttcacaatattgattctttctatccatgggcatggaatgttcttccatttgtttgtgtcctcttttatttcgttgagcagtggtttgtagttctccttgaagagatccttcacatcccttgtaagttggattcctaggtgttttattctccttgtagcaattgtgaatgggagttcactcatgatttggctctctgtttgtctgttatttgtgtataggaatgcttgtgatttttgcacattgattttgtatcctgagactttgctgaagttgcttatcagcttaaggagattttgggctaagacaatggggttttctaaatatacaatcatgtcatctatgaacagggaaatttgacttcctcttttcctaattgaatgccctttatttctttctcttgcctgactgccctggccagaacttccaacactatgttgaatagcagtggttagagagaccatccttgtctcgtgccagaagggaatgcttctagtttttgcgtattcagtatgatattgtctgtgagtttgtcataaatagctcttattattttgagatatgttccgtcaatacctagtttattgagaatttttagcatgaagtgctgttgaattttgtcataggccttttctgcatctattgagataatcatgtggtttttgtcattggttctgtttatgtgatggattgagtttattgatttgcatatgttgaaccagccttgcatcccagggatgaagccaacttgatcatggtgggtaagctttttgatgtgctgctggattcgctttgccagtattttattgaggattttcacattgatgttcatcagggatattggtctaaaattctttttgttgttgttgttgtgtctctgccaggctttggtattaggatgatgctggcctcatgaaatgagttagggaggattccctctttttctgttgattggaatagtttcagaaggaatggtaccagctcctctttgtacctctggtagaatttggctgtgaatccgtctggtcctggactttttttggttggtaggctattaatcattgcctcaatttcagatcctgttattggtctattcagagattcaacttcttcctggtttagtcttgggagggtgtatgtgtccagggatttatccatttcttctagatttcctagtttatttgtatagagatgtttatagtattctctgatggtagttggcatttctgtgggattggtggtgatatgccctttatcactttttattgcatctatttaattcttctctcttttcttctttattagtcttgatagtggtctatcaattttgttgatcttttcaaaaaaccagctcctggaatcattgagtttttgaagggttttttgtgtcactatctctttcagttctgctctgattttagttatttcttgccttctgctagcttttgaatgtgtttgctcttgcttctctagttcttctaattgtgatgttagggtgtcaattttagatctttcctgctttctcttgtgggcatttagtgctataaatttccctctacacactgctttaaatgtgtcccagagattctggtacattgtgtctttgttctcattggtttcaaagaacatctttatttctgcctttatttcgttatttacccggtagtcattcaggagcaggttgttcagtgtctacgtagttgtgcagttttgagtgagtttcttaatcctgagttgtaatttgattgcactgtggtctgagagacagtttgttgtgatttcagttcttttacatttgctgaagagtgctttacttccaattatgtgtcaattttagaataagtgtgacatggtgctgagaagaatgtatattctgttgatgctgggtggagggttctgtagatgtctattagatctgcttggtccagagctgagttcaagtactggatatcctttttaaccttctgtcttgttgatctgtctaatgttgacagtggggtgttaaagtctcccattattattgtgtgggagtctaagtctctttgtaggtctctaaggacttgctttatgaatctgggtgctcctgtgttgggtgcatatatatttaggatagttggctcctcttcttgaattgatccctttaccattatgtaatggccttctttgtctcttttgatctttgttggtttaaagtctgttttatcagagactaggattgcaacccctgcctttttttcttttggctttccatttgcttagtagatcttcctccatcctcttattttgagcctatgtgtgtctctctatgtgagatgggtctcctgaatacagcacactgatgggtcttgactctttgtacaatttgacagtttgtgtcttttattggggcatttagctcatttacatttaaggttaatattgttatgtgtgaatttgatgttgtcattatgatgctagctggttattttgcccattaattgatgcagtttcttcatagcattgatggtctttacaatttgacatgtttttgcagtggctggtaccagttgattctttccatttttagtgcttccttcaggagctcttgtaaggcaggcctggtggtgacaaaatctctcagcatttacttgtctgtaaaggattttatttctccttcacttctgaagcttagtttggctggatatgaaattctggtttgaaaattcctttccttaataatgttgaatattgttcctcactcccttctggcttgtagggtttctgctgagacatctgctgttagtctgataggcttccctttgtgggtaacccgacccttctctctggctgcccttaacatttttttcttcatttcaatcttggtgaatctgacaattatatgtcttggggttgctcttcccaaggagtatctttgtggtgttctctgtatttcctgaatttgaatggtgctctgccttgctaggttggggtagttctcctggataatgtcctgcagagtgttttctaacttggttccattctccccgtcactttcaggtacaccaataagatgtagatttggtcttttcacatagtcccatatttcttggaggctttgttcatttctttttactcttttttctctaaacttctcttcttgcttcatttcattcatttgatctttaatcactgataccctttcttccagttgatcgaatcggctactgaagcttgtgcatttgtcatgtagttttcatgccatggctttcagctccatcaggtcatttaaggacttctctacaccagttactctagttagccatttgtctaatcttttttcaaggtttttaacttctttgcgatgggtttgaactttctcctttagctcggagaagtttgatcatctgaagccttcttctctcaactcatcaaagtcattctccgtccagctttgttccattgctggtgaggagctgtgttcctttggagaggagaggtgctctgatttttagaattgtcagcttttctgctctgtttcttccccatctttttggttttatctacctttggtctttgatgatggtgacgtacagatggggttttggtgtggatgtcctttctttttgttagttttccttctaacagtcaggaccctcagctgcaggtctgttggagtttgctggaggttcactccagaccctgtttgactgggtatcagcagtgggtgctgcaggacagcgaatattgctgaacagcaaatgttgctgcctgatcattactcttgaagcttcacctcagaggggtacctggctgtgcggggtgtcagtctgcccctacaggggggtgcctccctgttaggctactcaggggtcagggacccacttgagaaggcagtctgtccattctcagatgtcaaactccatgctgggagaaccactactctcttcaaagctgttagacagggacttttaagtctgcagtggtttctgctgccttttgttcagctatgccctgcccccagaggtggcatctacagaggcaggcaggcctccttgagctgcggtgagctccacccagtttgagcttcccagccactttgtttacctactcaagcctcagaaatggtgggcgcccctcctccagccttgctgccaccttgcagttcgatctcagactgctgtgttagcaatgagtgtggctctgtgggcgtgggaccctctgagccaggcacgggatataatctcctggtctgccgtttgctaagacaactggaaaagcacagtattagggtgggagtgacacgattttccaggtgctgtctgtcacagcttcccttggctagtaaagggaattcccttaccctttgcacttcccaggtgaggcaatgctttgtcctgcttcagctcacgcttggtgggctgcatccactgtcctgcacccactgtctgacaactcccagtgagatgaatccgatacctcagttggaaatgcacaaatcacctgtcttctgcgtcgctcacgctgggagctgtagactggagcttttcctattcggccatcttggaactgccccccactctttgtctttagttaccagggtgggtagggaagaaccattaggtccaggcagaactaggcatgtttgagctcagactctccttgggcaggtcttgatgatgatgctgtgggggataagggtgagcttcacaggtcactggaggtgtgttcctaggaggtttatggctgcctctattgtgtcatgcaggttgttagggaattgggtgaaagctgacagtcatgggcctcactcatctcccatgcaacccaaagggccactctcactcccaccctgcctccaccaatagcaccaagtctgtttccaggcagtgagcaagcagggctgagaacatgccccaggctaccagcctctcagctgcaaaagtaagtagggctttcattcttcccctgcttgtggagtctgcccatcagagtcatgccttcccctgagttctggccaggagacttcttgatcgattccagttgttacgaagttcagccggaggttttcttctccatgtgacctttgcccagtgcctctggccaccctccctaaggaccccttcgaggcagggcagaaatggtttgtgctgggggatccagtgagccctcagggcttttcctgtttcttcctctacccctgtatttacttggctctctaaattgactcagctccgggtaaggtcagaatcttctcccataatctagaccttcaggttccccagttggggtggtggatgatctccctttcccacttccattgtttgggcactcacagtatttggggtgtctcctgggtcctgcaggagcaatcaacttttttcagagggcctgtgggttctctcagctttcctaatgaattcctgcaggcgttctggagcaaaagttcacaatatgagtcttgacacactgctcctctccgagtgggagctgcaatctagtcatgcctcctgtccaccatgatcctgagtgctcctttttttttttgtttttgagagggggtctcactgtgttgctcaggctggagtgcagtggcacaacctcggctcactgccttattcttttaaaagcatttaagattttccaagaaagtgaaggaaaaatctttagggcacaaaacaaagaggaaaatggaaaactagggtgctaattttgaagtgaagcttcactggtgtgagggtaacaaagcaatttggattttaatggctatgagtaaaccagaaatgatcagtggttttagtctcttcctgggagacttgaaagttggaatctcacatagccaagacttttgaagagctatacctttggattttaagaaaaaaatgtagtctgtccatcaacaaggcaatcattacaatttaaaacaatatagcagatgagttaaatgacatttaaagctgtcaaaaagagaattagtaaagtggaaaagaatattgagaaaataatccagaatgcagcacagtgctgctaaagctcttgctattggaggtctctgcctaattaggagccctggatcctctggtcccatcttgttgcagcccccattgctgttactaactgaaactaaacaggaaggaaatttatcacctcctcctgcctttcaataacctgctggtgtttttcactaacaaaactctctggaatccagcaggcaaggaagtcaattatgattggaaggatctacaatacttagcaaagcacagagaaaggggactactcattatgtggaaatagatcagcatgaaggtcttcatcttcaatattgtcacactgcataggctgacaaggaggagaaagaggagggattgatcttgctgtctcaggggtggcagaggcagaaggaaatctacatacaagtggacccacacagttctaacctgcattattcaagggtcaactgtactgggttttagtttgtactcttcaaatttatttaggtggacagaaagaaagataagtgaaaagactaatcagatacatggttttcaagaattaatgcaggcagatgagagacaagatgaaagcctattatgaatagccaactaattcacactctctctgcttctctctctctcactcccatcctgagtgctcatcccatctgctttgttattatttctcttcagacatttcttttccctctgactgtcagtgttcatggctaatggtgaaaatggcacagctttggaatttacatgccctatgatcaaatcagcactaggaatttgtggtatctctgaattctagttgtaaatttttatgagagagactatctcattgatccagtttggctccactggtagaccagaacctaaacatctatggctatccagggtgatggtggtggttacgaatttgcctgctacaaagagagcatacatttgggtaccaaacacacacttcaaaatccatctgctgtgtttgtgtatattgcttaggtgtatgaatatgcagtatagatggcccagattgatttggacaactcccaatgtgttttcttgcaatttgctgagcttatgcgtgatctatgggttgcagattgatttaaagtttctctggtgatttgtggtgtcagcatacataggtacgcttgaatatttaagcagtgtcaatatggggcagagaaaggcataatctacatgatgttatggagctaattttaacttcctttgttctactgaagacaaaatagataattttgtttttagaagataaaaaagagataaacatagttttaaaattttaactgctttattgagacgtagttgacatacagtaaaacacatatatttaatggataattcgataaatgttgacacatgcatacattcatgaaaccatcattataatcaagatcatgaatatattcatttccaaaatttgtgttcattaatctctaataacaataaaactcaccctaattgtaacaaaattttttatatattttaatttatttttctttccttctttagcaaatgctattgaacactgagatgagtaaatgcttatttagtgataatgtcacttaatcaagcagtataaatttagccagaataaatatttgaagttcggggtacatatgcaggatgtgcaggtttgttacataggtaaatgtgtgtcatgggggtttattgtactgattgtttcttcacccaggtgttcagcctagtatccattagttatttttcatgatcctctcccttctctcaccctttattttcctataggccctagtatgtgttgttcccttctatgtgtccatgtgttctcatcactcagctcccacttataagtaagaacatgacttatctgattttctgttcctgccttcacttgccaaggataatggcctccagttccatccgtgtccctatcaagggcaggatctcattctttcttatgactacatagtattccatggtatatatataccacattttctttatccagtctatcattgatgagcattccatgtctttgctattgtgaatagcacagcaatgcacatatgcgtgcatgcgtctttataatagaacaatttatagtcctttggatatataagtaatgggatttttgggttgactggtatttctgtctttaggtttttgaggaatcaccacactgtcttccacaatggttgaatgaatttacactccctccaacaatatataagcattcctttttctttacaacctcaccagcatgttattttttgactttttattaatagccattctgactggtgtgaaatggtgtctcactatggttttgatatgcatttctctaatgaccagtgatgctgacctttttttatatgcttgttggctgcatgtatgtcttcctttgaaaagtgtctgttcatgtcctttgcccactgtttaatggggttgtttgtttgtttctcataaatttaagttccttatagatgctggatattagacctttgtcagatgcatagtttgcaaaaattttcttacattctgtaggttgtctgtttactctattgatagtttcttttgctgtgcagaagctctttagtttaattagataccatttatcaatttttgctttgcttttggtgtctttgtcataaaatctttgcccatgcctatgtcctgaatggtattgcccagaccccattgtctcagtccaaaagtgtcttaagctgataagcaactccggcaaagtctcaggatacaaaatcaatgtgcaaaaatctctagcattcctataccaccaacagtcaagacaagagccaaatcacaaatgaactcgcattcacaattgccacagaaagaataaaacaccaaggaatatagctaacaggcgaagtgaaagatctctacaagaagaactacaaaccactgctcaaagaaatcagagaggacacaaacaaatggaaaaacattctatgctcatggataggaagaatcaatattgttaaagaatcaatatcatgaaaatggccattattctcaaagcacttcatagattctgtgctatttccattaaacttactgttgacattcttcacagaactggaaaaattattttaaaattcatacggaaccaaataagagcctgaatagccaagacaatcctaagcaaaaagaacaaagctggaggcatcatgctacccaacttcaaactatactacagggctacagtaaccaaaacagcatggtagtggtacaaaaacagacacatagaccaatggaagagaatagagaacccagagataacaccacacacctacaatgatctgataacatgagtagcaattctaagtaaggggacagaaggaataaataaaaagcctgagaagtctgttagacctgatataaaataataaatcaagagaatgaaaaatcaatatggatttactgcacaagctcatctggaataaaaaagaagcaattagtgaaaagagccagtacagttttaaagagacaaaacaatgagaataatgtgctcctccttctaatataaaaataaactggatagctattaagattagaatagcatttctctggttggaaccctgacgaacagctcaataaaaaataatgagtcccaaaagacaccctaatttaaaaaaaatgctcaaaataggataaaggaaacatcacaaatcaagaatgaagtagcatagggtgagaaagcagattgttgtttcacattatatgcccaaataaaatctaaccaaaaagaattaatggaaacaaaacaaaaacaacaattttgtgataaactagaacagtatatgacttttagctggatttcagtgggaaatggcttctttagctttaaagtgatggaagaatttaccaccactcagccttgctgcgttgctccggctgtgttggtccactccgggcacaactaactgatcacaaggtgtcagggactttatttcatcttaataaattgtctcctggcaagtctgaatgaacagattaggacctgatgtcttaaaacaatgtttatcatactgtgatcagtaaaccagctacatctgaatgtcctgaggtaaactgttacataaataaataaaaagacagaaatgttttaaaaagataaatttttaaggaattctagattctgtcttaggtatgttgaatcattatctcttggacatacaaaatcaaaataagctcaggacactacgcattttaaccacattcttaacacaatagcaagttttgagaattactggcttgacagaagcactgttcagtggaccagaaggagaggctttaacagagatactagaacatagtggtggtatctctattgtgccctcctagggatgcccggagaaaggtcctggtttctcatcaggacaagtcagattctctctgagtatgataaacctgcccagtccctgtctcccctgcctttctttctgggtttacaacctgcaattggcatggtttgctgaaaaccaatggttagagcgtaaaatagaaatctctgtatatattttctagaaacagcctccatcatttggataaaaagtggtaatcggccatttgttaccactgacttttgtgagaaaattactgttgagtacatctagaacaatgaattgacttgctcaatcttcgtttaaccttccttctaagtttgagaggtttgaaagccaaacactgtatttttcagatttctttgccgttagagttctggaagcaacttaagctttgtgattagattgactcacatgatgtttggatcataggaatgaggtgaaagcatcttcctgcatacgtgttggctgaatctgttgggaaacaaggagattctgaagcatcttgccaaaagactactgagttttctggccccatagacaccagtggcttctcgaatttgggagaactccaggggtggtctctgggccggtagtttccctggtgggtcgcttctgcaatgttccaacagctgatgattcctgaagcccagcccagaatgtgctcctttaggttcagcagtgactttgtaaatgtctgtattaaatccttccctgcttaaaataagcagggtgggttctgttcttaccccaaactgtaatggatacaacaataatcaagggtttggagagttcatcgttgaggtgtcttgactgggttttaaatttgtcagtgaaactgacaaattttcttgaagaagtggtaaaagctattaattttattaaatattggtccataaatatgtatcttttaaattatctgcatgatgaaatgggaagtgtgcagagagcacttctgctgtacaccaaagtacaacattcattcagaggaaaaactcttgtctggttgttagggttgtgagggttgtaatcactttttttttggtggaatgctatttttacttgaaataactgacagataaagtaaggttattcagatttgggtgttgggtgttttctaaaaaataatcagaatgaatgtgtcatttcgaggaaaaccagttggtacttggtgaaaaaatacgaactttcaagcaaaaactagaattgtaggaaatgtgtattcaccacagtgagcttgacattttcttcacttaaagacttttctgatatgattagtgatgaaattactacacacattttttttttttttgagacagagtctcgctctgtcgcccaggctggagtgcagtggcacaatctcagctcactgcaagctccgcctcccgggttcacgccattctcctgcctcagcctccagagtagctgggactacaggcgcccgccaccacgcccggctttttgtgtgtgtgtgtgtgtgtgtgtgtgtgtgtgtgtgtgtgtgtgtgtgtgtatttttagtacagacggggtttcactgtgttagccaggtggtctcaatctcctgaccttgtgatccacccgccttggcctcccaaagtgctgggattacaggcgtgagccaccgcgcccggccactaaacacatttttgattgcacaatgtaatgtagtacgttaacacttgggaggtctacataactcagtagcccatattttcctgagaagtaaggttacaaaatcatgcactggtaaatatctatgcaaagtggaagagaaaccaatagattttaatgtaactgtgaagaaaaagttcactgacacatttgcagatttcacagtgcagctcaacttcaagaaactatcactcgtcaagttttgttgtagtatccagaaagaatatctacaattatttgaaaaggctatatatttgtggaggttgaaattttcttcatgtaatcaacagaaacaacatatttagatttaatgtagaagcatatatgagaacccagatgtcttttattaagccctatgctatagatatgcaggattttaagacaatgcatcttattgtttggaaagcaacgctacttttaataatatatgttattcaccctaatatgtaacaggtttattgttattttaatacataagaaaatactaaaattttctgcttcaatttgtaattctataaatatcgatagatatggcccatttgcacagaaattctttacggccctcgataatttttaacagtatacagggatcttatgaacaaaaagcttgataactgctgttttagagaacaagcaagtcaataccaccttccgccaggagatgccgccactaacacatgttgcacactgacggcttaaatttgaggcttcagggtctgcaatacacacaggtgacttacatcagtttaatttttcacttaagctaatggtgagaagaagacaatagagagaggaagaccatctctaagtcttaatacaattcaaaatgaacttctgatcagacctaggcagggaaacaagaaaaacaaaagaaaggatgatctcaaaactgcagaggggaaacaatcactgtttattggcaccgcctgcagcagcgagcgctgccctctccgcatcggacctccaggctggagagcacccctggatttccagctataaatgaggtcaagctttttccggaaggaaacttttccactgctctcgttgctctttacataaagagcaaaattcctagccacgaacttcaagttactgtgagacttggccctgaccccagtcgtacaccctccaatgcccacagactgaatctatttcaccaaatttacagaagtggttctctgagcaatacttcacagccatggagctgtcttaaacatgatgtcatttccctagtatcatgaaatattatataatattatttatgtagcttgttctctgggaaatctgttctgagaaattgcgtcatctccaaaacgtagtgcccaaccacctggaatataattatgattattagcggctaaatattgtgaagtctctgttcctaattgtccagaaccattagcaatgccttagaatgtgtatatttccctcccatattgatgtccccgcacttgaaaataatcaatcccttctaatttacagttgctgtgaaatatgaaatgtaatgatatcactaccaactgatatcagttctggagcacagtcatattcttttctgatttttctttctttgtttcctgttcttcatgtgaatcctttttgctgtgctgatttgggctcactaatttttcctctggattttcatttctctgccttcttcaagggaatccctgtgccttctgctgatttcatatctccagccttactctggctaactcacactcactcccctcctacccactgccagccgagaaagggtggtggctctttcttcatctgcagaagaggaatctcatgtgtgtatgggagaggaaagttcaatgccctggtatgggtcattcatcaaattgtcttctatcctgccttccagagatctaggtaaactagcttggccatcaatgccatggctcatcaatgtccaagacccaatctaaaagattggctaagaattttgggaggcttatgttcacagggccttctcagtctccaggcttcttatacttccagtctctgctttgccctaggatgcgtgaaacaacaccccctttgaattttgcctgaagtccactggctgaaagcattgatgagcattgtgcactttgtggggtcatttcaggggagttcagaagacagcaatagaatcaattttgcaatggaatggcaagcaatactattttcctttgtcgtccctcccctcacctagtcccagccgccttttgctttgctggctgtttttatccatcctcccttggctctcatctcttctctcatctctcctcatcttcctggatcggtaagtcctcccttctgcagcttggcaccagcaggcagaaggctgcagaagggagggcaaaagacttactgatccagccttcagcaggcattttcttttggaaattgatatgctaattctaatattatatggcgatgccaaagacctggaacagccagaacactgaaaaaagaacaacaaatttggagggccaacactctctgattccaagaattattataaatctgggtgatctttagaaaactctgatgcccaagccacactgcagaaccattaaatttccatctgtaagtgtggggcccagcagcaggagtttttaaagctccccggattattcctctgtgcagcccaaatttaaagctgccccaagccggcgtatttcattagtcctctagagggcgccccaagctcgcaactgaccgaggaatggcgcttgcaactaaatagatggtcaccagaccttctgaagctgactttatcagacaatcagataatgtggggaaagaaggaagaataaagaatagaaacagccgagcgcggtggcttatgcctgtagtccagcagtttgggagactgaggtgagaggatcgctcgaggtcaggaattcaagaccagtttgggcaacatagcaagaccctgtttctacaaaaaaaaaaaaattatctgtgcatggtggcatgagcctgtagtcttaactgctaggaaggctgaggtgggaggattgcttgagcccaggaggtcgaggctgcagttagctatgattctgccactgcattccagcctgggccacagagtgagactctgtctctaaatatatatatatataaaatatttgtataaaatatattactattattttaatattttatttaatattatttactatttatatgtattatatatatgtatgactgatgaacactaccactggcagtattatttttttagttacattaagtatttgtcatgtaggggaattgaaaacagtttaaccgcttttgattctgtatcaatggcatccttgtatgaaaagaaacactaattctaaattaatctttgtggctaatgggactttagatttagcctggccgttggaacctcatcagtcttggctctggtttaatcttctaagcaagcacttccacggtcctacatgtcccttttgtttcagccgtgctggtctaatcacctttttccaaacttgaggtcctactgcccccctaggttaagtggcacctccctaggctgacttcgacattccccagccctgtcacagctctggtctggatgctgattaggaacttgttaacatcttcctggctcatcgataccccctgtaattttgaattgttttatgccttgaccgatcaactagagtgtatactttgtgagtcccaggacctcatctttaataatcatgagtagtacttgcatatagatggttgatccatatttgcttgatgaaaatatttgttctggtttgatgagcttaaagtgagtttgagaaaagggtccagttttaccattttctccctaggtcttagcatcctgcctggaacagagaaagcacttaacacaccattgttgactgagatgtatgtgtccatgttcagtacctacttgcacaggaatgtgattttccttgagcctattcctttaggctgaatcttgctccccctccctctcctcctcctggccctcccacttctcatttgcttttgcgttcagctctcttaaaggaactactctgaatacatagtatttcctccctttatgctgtggattgccttccctccctgcttctcccctcttatcctccccatctttcccttgtctttcttatacatgtgttttttgttttttaaattaatacattaaataagattgaggtagtgaggagttaagtaatattttagatatttgcaacaactctaatgcatctgcatatatctgtggttttattggtgacaaaatcatgggaatggccagtactgctgtggtttatcaacctacactcaaattgaacaaaatgttacatttcagtagagtttagtgaaaataaaaatgtgcttctccctcatgaattctcttaattctgttcagaaacccatggtggcaggagaggtttgtgattccgcaggttaagaacctcttttctacaaaaatatgacaaacacaagatttatatttaatggtcaaatgagttccttttctttccttgttccctccctcccttccttccttccttctttccttcctcccttcctctttctattaaaaccatttaaattttcagaaaagtttctaagttgctatctttaagtgcaaatttctatgggaaacaccagagactgctctcagtagttctcaaacttaagtgtgcatcagaatcaccttcagagcttgttaaacttcagataacagttctccactcccagcgctttgatgcagcaggagcctgagaatctgcatgtctgacacgttccggtaatgctgatgttactggtgtgggatgcctctttgagaaccactccctttaaaccttcaaactctctcacacagagcctgacattccgatgttctggtggtttgagttgcaagtgaccatcttggaaggagcatttgctgtagtcagggtggagcaagaagcaccactggtgtgtgatcaggaggcgacaggactgtgggagacaagcttggggcagaccccgtgggcactggaggcacagctgatgtggcagatgaccagggtgttttaacccgcacccctggtcctgctgaaagcatccctgtaagctttataaaatcaatcaaggaagaagggaacaacgataaaccaagcttgcagcacactcagcactaatcagtaggtcagcttgccttctgcccggcttcctcgtagttgttttcctgttgtcctagaatcatgtaaaccctatcataagattttagctcctcttgccgggggcggtggctcacgcctgtaatcccagcactttgggaggccaaggcgggcagatcacgaggtcaggagatagagaccatcctgactaacatggtgaaacctgtctctattaaaaatacaaaaattagccggacgtggtggcgggcacctgtagtcccagcactggggaagctgaggcaggagaatggcgtgaaccccggaggtggagcttgcagtgagctgacatcatgccattgcactccagcctgggaaaaaaaaaaaagattttcgctcctcttaactgctctatagataacaacaaaaggttaagttttctatttgagatattctttcaggtcctgcaaactcgtgaaactactgacgccaatgaatctgaaggaccccacgaggagctgactcaccaaagaatgtagtttccacatcctgattatttcactcctgttatcacaaccaaacagcaaccccagttttctaggcccttgcccccataatccccttaaaaaccccagccaagacctccatggggagatgggtttgagggccccctcccgtcccctggcctggcctccctgcaatcactgaactctttctctgctgccatccctgctgtattgggctgttatggcacagcaagcatccgtgcctgccgattctgtaacaccacctgagtttgccagtgcctgtggcagtcagtcctcagcatgctgacatttttcagcatgtggggattttcccctgcacccccagagggtgaaatgacaccccttggggcagcagctgccaacccatagggtttgtggcgatattccccagccttccagttctgggtgcagtccacacccttccacagagctggcttgagactctgttgcccatagcagtcatcactcattaatcttgcttcagtggccatttccaccctccctgcctcattctctcctctttctcttccctcctgcttcctggaatcaccttccaaataaacctacttgttcccaagtgcttgcctcaggaactgcctttcaggaaacccagtcgaagatgtgtgttcacatcctagcctgccacttcccttctgggtgaccctgggcaatgaaataaatctcttgagccccatttccttgcagtgccataggacagcacttccatctcccagagttattatggagacagactgaaataatattcaagaagaatcctgggctagttcctggccctgcagtgtaggtgctcaggagatattagttccctccacccctgaggttggttgctttctgagaggaagagggaagaaggcagaggaagaaattaatttgctagatccatgaaacatgcaggcaaggggtttgccttaggcacagtgagacggatgagtgggcagatcaagtcttcatccccaagaatgcagctcttactcttggagagttctactgactctaagtaaagatgttcctggtggccatggatgctgtgagccatcctgcttctgttcttggatttaccaatcttcacctgcaacacctcctccacagaatctatctgatttcggcagttgggttttggatcgaggggactacctcattagctatatgacaatattcctcttgcccttttccctccatctcatttcaggaagtggttttgtctttttattacttttaaaagtttacagcagaaacattaaagagatggttggtgttcattgattagtttgaatatggggctcaatttatttatggtttcattctgtaaaataggaagagaagtagaaatgcctttgaactaatttcagaattctttgctcagcaaaccttgtcattcccaggcaataacacaacgttgcaacagaatccaaatgagagacactgatggggaggggagatcaatataggttttctctcatttctcgactcactttgttgagtttcctgcaggctctgtctgtggaaatacatttctaagtacatttgctgcaggcagatacatctaaggggcagaaatagagcaagacggaggtagtagatatacgaagaaaagatgaaatgcaagagaaaccaaagcaaatacaaatttagagtgacaaattaattcttttggtacttagaaatgattttaaaagtcagcttttagaaattcatattcaaaagaaagcatcctttggaaacaattttacatgtaattcgaagctgggaactgtggcctctgaagctggtcttctccagcattctatcccaccactctcactcagccaaaagagctggcacaaagccgggctgctcatctttccagctcctggcagagcagtggaggatgacaatggatcacggagatcagggcccatttaaaacagacaaatagaatttgagatgcagaccactaaaagctcaagagctgaggtgaatcaattctccctttgattggtcatggcaagctgtttccttaaccacagtagactacgggctacttgtgtccagaatcatatttgacacattgttattttttgcatagtaccactggggctttgaaaaagcttttttcttttttttttttgcaaatagttttaacattcagattttattgcatgactctttggtcttgcattgtgtgtgtgcacacacgtgcatgcatgtgcatgtgtgtaagtaaggtgtcatatatcaaatgcatgcatgtgtgcatgtgtacacacacacagtattggggtggagagagagagaaatcctaaacacagagctcagaaatttgcatttaattcagctggttaaaggagtcactgaaagtttgtgaacagcagactgataaagtcaacatttcccttgaagaaatttatactggtgaagtaaggatcaattgtctaagaactggttatgctggaggttggtgattagtaacagaaagaatagtttggaagttcttgaaaatcggatggataagagataagaagaaataacccagcaataccagcaataataacagacatgaagtaatgtatgtgagagacatttaagaagtgggatgttcatgatgtggcaattccatgcggaagggaacgaaagaaggagccacagaaatctcagaaatgcaatgtatctgtattcatctctgggtcaggacctcattaaaagacaaccccacccagttattcctaatgttcgatagaatttccagaggaaattctgctgccttttctgatggctgtgtcttccagccactgctttcctaatattcttccaactgtctaacctgagcattctcacatccaatagaacttcttccttatacgcaattggtttgaggattacaaaattatttcataaagaaggcagccttttaatattgagtatattctgtttaatagggaatttggtttcacttggaagttcagctgaatcatctcagagagagaagatggcctcctcatctttaggatgaaataaaagtactttagaacacacagaaaacctgaactctgggccctcaggctctcctgggatggcaggacccaagaagagaagagggtgtcagtgtggatgcctttgatggctggacattaattactgtggtttctggaagcagtgggtcctcagcagtccagcctgtggtcagtggggaagacacttgtgaggaatggccttgtggttttcctgagccagactcctttcttattttcttgatgtcatataaatcagctctgggttttttatgatctaatagagggggcgggggagcctcagttaaggtctgatattggatatctcattgtctttggtgagcagaagctgggtgctcagcttaatttgttttaaggaaaaaaaaacggagtgattcatctaccaaatattgtgaaccacaaatacctgtttcagtgattaagatgtagggctctgtacttttattccgctggttattcagaggtgtcttctagagctaatttaattagatttaccttgctgtgaaactctcgatgtcagggacttgctgatgctggagtggaaattcaccactgttagtattgtcagtggcctggaaaatgtaagataggttgtgggttatttttttggcccttgttaaaggtgtatgtgccttcaggataagttctttatgaggctcacccgtgatcattttgagctagttataccatccagaagattaaaattgggcatccttcacagctggtgtaggtcccgtattggggaagttcaaagtaagccagataggactagaaaccactggagatggggatcaacccaagcatgaatctgaagcatgtttctagctattgcctaagtgcaggtaagtgaaccacatgttatctaatgaaatctgaatggctaagtcctaggacacaacattcaaaacactctagcccaccttcacgcaaggaaatgtggccagggcccacaggatgaacgtgactctagcccaccttcaggctgtgggcactggccatatttcctttattttgtatcaggaatatcttccacttgctgtctccaagaacatcagaggttgcaagaatcaaatttcagtttgccctatgcctactgaaaattactttcttctgataatttcccttttgtatgtcttctgtatctttaaactagcatccaatatctgtaagtgaagaagtgtgttttacactttttcatcatctgtgtaatgtctgacatgcttaggacattcctgttgaattgattgaaacacaaagagagtttgtaaatgtttgagaggctgtctttgccatcataaacccatggctttcagtgtataaaggactataatttcaagagctaatttaagctttgtcatgctctatgaggttagtattatcatctctgcaaaataagaaagccacttttgggcagaaatctataaacaggaaactttttttactgaaagaaaagaagagtttgataatccctgtacctctcaactgccacgtagtaagaggtagctttgtcccatagaaatgctgtgataattcttaaaaagaaaaatgtgtgtgtgtgtgtgtgtgtgtgtgtgtgtgtgtgtgtgtgtctgtatctatatgggtgaaatggtttggctgtgaccccatccaaatctcattttgaattgtagctcccataattccattgtattgtgagagggacccaaatggagataattgaatcatgggggcagcttcccccatactgtctcatggtgctaggtcccatgagatctgatggttttctaagaggtttcccctttcacttggttttcattctctctcttgcctgctgccatgtaagacatggctttcaccttctgccatgctcgtgaggcctccccagtcatgtagagctgtaagtccattaaacctttttttctttataaattacccagtcttgggtatgtcctttatcagcagcatgagaacagactaatacaatgggtatgtatcatatatatgatacacataatatgacacacatgttcaaaaaaacccctagtcatccaaatagtgaaatgatttgctttgagtcttaaccaggatttctgaataaaactcttgagaatctgcaccaagccttggaatttgttatgtagataaagaaggtagatcattctgtatcaatctagaagacaccatagatgaatgagtagaaattactccagaaggcagacctaaatgtgatatatgaaacatcttccctaaaaagatggcataactacacattcacatttaataaaattccagtctccccagcggtctttatgacatgagacaatttctacccaaacaaaaaaataatgcatacatgcacagtgaaaatgtttggtaagactgagtttaaaatggcaatagtgtgtttttctttcattgtacatacctgtgttgtgtgatatttatcaaggaatccatatctcacgttatgaaaaaaataatgtggaaaagtgaaatgaacttggaggtgttcaaaggtgtggttggttacaagccaatacaccacctatcatcagaggtaacaagtagaagttagaaggttaatagacaaggactccatagatggagagactcccatttaattgtcagtgggagaagatggcttctaactcccagctcagtcctaacattctgtaacttgcaatttttctcatattggccatgttttccaaacctaattataaaaactgagacaatcatggctcctggtcactgaaagtgttaagatatttttaaccagagtaaaatataaaataactggagtaggtactttttttcctatgtgagcaaaatgagaaaggttccaagctttgtgtaggagctggctgattgcatagtcactgtcagccccccaagtagacctacctccttctgcagctgggtttcattacctctgagggcaagctgagttagcaacttcatagtggcagattgctaacccctctttctttagagtaaataacatatttggcaaataaagggtaacctatattttcctcagaagatcctttttcctcctgaaaacattttaagtggtaatcatcttcctatccagctaggtttaaaaaggaaaaggaagactccacaccactgcctgtccatggggaagccattaaggcgaagcattgacttcagccactctggctggagcaaacaccttgctcttctatagaaaagagagaagctatttgtagaggatcaaagcagatcaaagcaatgcatcctcatcagggcaaacatgagctgagggatctctccgagagattttaaccgggtcctgggtcacccaagcctcacattatgaaatgaaagaagccttctgaatagaaacaccagctcataaagccccatcaaagacagaaaagacacaaaatactgaacacattttcctcacattcctcctagttttttctcttagatgatttgttaggtggctaagacctgaagggctggctggctccatacctgcaggtccgttggatcttgagcagttctctgcttattctgagtaagctatcaaaagataatgaggaggctggcagtagctgctgtgcaggacatggtctgcagaaaggggatctgtccttgggtaaccccacatgggttctgaaaaattccataaggaaaaaagagatgaagttcaaccaatgagatttttcttttttttttttttttgcatcacagttacctttgcctttcttgttatctttaggtgaggaggggaatattgcacaattttggttaaataattatttacaaataatccaattattcgcattaggacattcctgttgaatcaatggaaacacagagggagtctgtaaaagtgttgattttacactgggattttcagctacaaagcatgattttaacacaacaattttaactatgttcattgattgcctcaaatcacagctctgaactcaacatgcagtcttttagtgtgtctaagtctttatgcatggttagttttccatttttttcttttgtgtacaatgtattacaaagacagcataaaatataaaggaagaaatgttttttaagcaaaaaatatgacatcacagtaagtgtcaattatttttatattgttatgctctctctggtccttatgtatattacatatggatcctagttattttagagatgtatttgtagaatgcaggataatctgattgtccagggttttatagtctgctattctgagttaactttgtgtcataaacaccttctcccatttataatggttatttgtaattggtctgttacataatctaataggatgtgctgtaccataatttcctaaatcttcttttattattgaatttttgggtcattttgtcttcacactattatagataatgatgtaacaacagactctctttacattttaataaagacccaaactatcatttggctccttaataggttactaaagataccactagctgtgtggttgtttgctagtgtcctttctacatgattataataccattagcctgttgcattaaaggcatatgctttctatggagtggctttcagggaaagcagaattgaaacactgtaccagtagtgcctctcagatctgaaaatgaagttcattaaaaaaagcaatttaagaaagttcaaaaagaccttgattaacgagaacatttgagtggagaatattcaatgtaattgaatttcctgatatttgttactgctgttattattaggttatttttagattgaaattacacgttgaaaaacaattttcatgatataatgttttatgtcatgtaccttcagattagttaaaaaaataacaacccgtttcttctttatcctggttcccaaaaacatatgtgaaatatttgtctctttgtgccatggaagtgccataaattctctctcagaaagatttcagcccactgaaattccatctctttggaaaagtgcctcgtggacttacctggtgtcattctgaacactgtgatggtataacattgtccatgcaattggagtagagtggctgcagtatggtgaaatttaagaattatctacagaacctaaggcacccctttgcaggtataactattttaacaaaattccagatctgggtatttggatctgcctgtttgctctttcgtattaaagtagattgccacgaaaattccagtcaactgaggacttcagcacttaagatccacagaactccagaatttgtagagactgtgatgatcttgtaggtgataaactcaaagtccagaagcgttgtgagttttcttcaaggattgggacttgactcaaaaccctagagttatgttttattatccagctctctttttcctacctcagggttatatttaaagttttgttgtacatacttttgggtctttctttgaaacaccaggagcagttgatggagtatcactcaaaacacccacagacctgactcttggttttgctgtcaactcacttagcaagactgcattacacaataaagcaaggacatttggtttagtgacattctttcattcatttgctaacctttcattgtatacctacattttattaggtattggatatgtgctagatgctcagaacacagagacaaaagaagcaatagtgaggcagtctggcatggtagtcagacctcagggcttgaatcctagctctgccgtttattagccataaacttggaaaaattactcgacctctctacctatgtcaagtaaaagaagaaaggccagaagtcccttttattcttctccagtgctctatactcctcatcttatgtattgagaaatatctgagtccatgagtctctagaggaggtagattcaagtctgccccatctcactttaagaacatggtaatgcttggatatctttgataataagaatagggggtgggatggttgtggaccatcccaccctctcctgtgtagcattggcccctctcctgtgtagcattgagtccctctcctgtgtagcattggccgcaaaggggagaattacttacggtgccaatgaggccattcctgcaggtcatttcctatctaccaagagctctacaggcctgttggacttaattgttgtctcacttgaatctaacccagagacaatgcctcttaaaggacgctgggctgttgatagtgaaacaggaaaagttcccttgcccccttcacagggcctgcgatggggggtgtggctcacctctttggtgccccgctgctcaaacccctagagggagcaggcagacaggcaggttgtggggctctgatcccaaggcagtgtctagggttgaatgcttacagctcctgaggtcccagtgggagtgtgttatagtgtgttctttcagtttagccatctgtaggtgacttgtgttagctcaattagactccctgccttatctcaaggacagaggctttctgtatgcccgggtttcttgccttagtgtaccagaagaatcggatcatatgtgggcttggagaatgagtgcaaggctttattgagtggaagtagctcccagaagatgagcgagcaagaagggagtgggaaggtggttttcccctggagtctggttgctcagcagctggagctctcttctgaccacccctgccaaactccgcatcgttctgcctgtcgatggccttccacatgccggtgcctgttggtgtgctctcgatgtccttttgacgtccagctgcttgtgtcttcttccgtctatgtgttcctctcaatgtccagctgcttatgtttctgcccgctagggtctcagggtttttataggcataggatgggggcatggtgggccagggtggttttgggaaatgcaccatttgggcaggaaaacaaatgtctgtcctcatctaggtccatgggcacaggcccgggggtggagctctagccagggactcgctcttcccttcccagtacttccctgctccccttccaaatgattaggattccgtcacagctcttatccactagagtagctagaagggggatgtattcttagttttctgtgattattctcaatgtaggtagagcagtcaagtaattttttagcttttttaaatttagggagcatagaaagaatttcatagtcattagagaacttttataattttctcttttataaatttgagaaaaacctgcctcaccgtttactgtgcagagctgcccagtagggtgaagttcaaagctctcagaaggagtacgggggcctcttggaattagaagaactcctgcttcttcaaattccaaattggatcacctgtcaaggtgaaccacagtgactggccaaaactgtggacaaggacatgttacagagactcagaaataaaggccagtgcaagaaggacagatgggttgaacctagcattgacccaaaagtgatgtggggtcggggagtcattctgggctctaaaagtggcacatgcagtgccctggggagcaagatttgaaattccaaggttatgtaatgctataattttataaccgtgtgtgtgtgtgagtgtgtaacagaaaagttctgtttcaggagtttctgccacagcccatattaagatataactagcaactttcctcatgaggaaaccaaaaatagccatgaagatcgcagagtgtaatctttggcaaggcctttctttgggaggacaccttgctccccagatcttgagcagtggcttctgcatgcatttatctcatcaccaaggctcaaaacttagaagccatcttgcatactccatttttcttacctcacctttcagttaccattccttcagtgattctttatgttcctttgccagggtcctgctgccctctcaccaggcccattctacttacccccagcttctcttctcttcacaccacacttgctcctaatatttgctgtaacttactcaaatccagatataatatcttgctaaggaatctgtggtgaatcttgactgcctaaagaagaaactctaaactcctttgtctaacattttgttcccatttacttctctaaactcatagcctgctacttcccaatacttcctctaccgtgctcacaggctgcctaaacttctactaggttttcctgattttttcctgtagttctctcctactggggtcaccatctttccccttaatttgccttttgaaatcccatcttcaatattctgttttcccccaaaagactctctttgatctgcatctcccctctgatttgtaattaatctctccccacttcatattctcattctaagttgcttgaacattctctcctatgactagttggctgcaagagccaagaacccagaaaagaagtctatactaggaatatctttgagagttgttagcctataggtggtgtttatgtcatgggattggatgagattatttagaagaaagtatagctagacaacagaagtgggccaggagaaacaaatagcatttagaagcccagggatgtggatctgactgtcatctttttatggtgatataaatccagcacagattcagcatcaataagtaaccagtgaattgaattaaaaatggtgccagtgttccctgaaactgatgttataaatgtttggattttcctctattggggacaaggtatcaattatacgcttttctggagtgctaattcataagccatgttgttcccacctaccactgtcctaaggaaaaatgggttattgatacattcatgaattcactcacaaacattcaaagatcccttcttttttaaacatgtactggtgataaaatacctaatataaattgaactgatgagatgcttacatgagtgtgaaaaaggcacacatggaaatagtccaaaatttataatacaatgcaataaatgctaccactggggcaagaatgagccagattgtctctcatccagttacctagaggagagagagataagcagtttgggttttctctgaaaattagtgtggaaacactattatccaacagactagtgaaaaaaatacacctcaaatcctgatgttcagtcttccttcaggtgctgagagacatcatggtgtagtgataaaaaggctgagcactaatcagagagatctgagtttaatacctggtcttgtcacttacgtgtacctgtgtgagttagtaaaccttctcaaaactcagctgtcatatggggataataatactttctccttttggtctaagatggagataaattgcagtataagagcatatctcttaattttgtcattgttgtgttgttattgctattctttttacttctcgtgtagcaagaagagtggaaaatgaattacagaccttcttaacttccaaggatgtagttttgtctacaaatggaaaattacctaacatctgagaaagtgaaaagaaaaagagcttttaactctctctagtggattgaggagtaaagagtcttcttccttatatgtaagcacacccaatgccaactaatagaaagttttattatatctatatgtgaagttaaatgagtcacctcaggaagcaatgggtgaaatgaatgatggtgaggctggcaatctgtttctgtatatctcttcctatttttctattaaatgagtcacagaaaggaaatatgaaactgactcctcaaagaccagcctgttaaataaaaaacctaacccaaagcttaataacagagaaaaaagtccctcgtattactctcccaaatgggagctcgatgacatagttggggctaatgttcattgtctttgaaagcaagaaaaattgaactacaacctctccttattctcagataatgaagaatgaaattgaggttgaaaaggaagtcagttgactttctgaagtcagttgactaaataaatgtgatggtgctgtgcagactcaaatgccagagaccagcatcctaccagattcatgattttgatgattttgattatttatcactaggtaagaattaatccccagtcttgatggcttaaaacaatgaactattgtgtctcctgatttcctacatcaggcattcaggaagagtttggctgggtctctgttccatgtggcatcgagtgaagtcttttgctagtattcatctagcagaagggctagtgtggagggtctgagacggcttcactcatgactcatgtatctcgcaccttggaaagctgagatcacctgggaccctagaatggagaacctacatgtgacatctccaaaaaagtgacctcaggctagtcatatttctcccatggtggtccagggctcccagagtgagcactctaacaggagataaattgcagtataagagcatatcttatactcttataaaccctggataaaagatgcagggtttcttatgacctagctcataagtcctaggacatcaatttcaccacactctattggtcaagcaaatcataagagcagcccagattcaaagagagggaaatgagacttgacctattaatggccagagtagcaaagaacttgtgattatctttattctcttatacagacttacacctgggttataaatactagtgacacttcagactaaggtgtcatgtaatatactattgtttagctctggataaacacatttctgtgtactctcatgtcctatggcttaatcttatagtaaccatataataatcattaaaagaattattctcttgacttaattgaagaacacctgagagtttttttctggccacaatatttttctcagatcactcaaaggtcaggctggaaaagctaggtaccaatgcttgccgaaggggctctcagctaattatggataggaggtggggaataaatgccccacttacttgctcctaaggtaggacagctctaaaatcataccacgtctctttaggatgcaattggaccattcataatttaaagggtcattgacctgatgttgaataaagtgagccttgctttttttcaagggatttgttcaaggtcacatggcgagtaggtgtagcaatgggtcaagactggaactctgggtcttctgactcctgggtcactgttcttgcctctgcaggtgctgtagggtattgagctggttgccttagcttttactcttgcctgtgtgcacaccagtatgactggatgacacaatcaagatgcgttaatgtacacccaacacactcatacatacttgacgccaataagtaacctgccttggtcagttcactgatcaaggctagagaatatcctagaaaccatgaaatgaaagattgtccatctcacatgattcatggttttttttgtttgtttcctttttaaactggatgacttatctagacacacctctgggtgcttggattctcgctcggcactggtgtttgtgcctgccatgtgggacgtgtaggcaggcctgcacagtctggtccagcccctcccatcttgccccaagcccatctagggctaaggcaagggagagcttctcccagtaaataaggatcaagtatatgcccagcagcaatggccgcatccagctcttacccaggaacgccatctactggctggtaagctgaactgcacagcctgatataaaacctgccaaaagaaatccacggggctatagaagcagaaaaaaagaccctatccagcattctctacagtcacagcccctggtcgggggtggggggttaaagtaaagggaaataaaaaaaaatataggaaataaaagaaaaagtcctacctgtgccaaaataattacaaaaattagaataccagcatctccagatgagaaggaaccagctcaagaattctagcaccatgaaaaatctgaatgaaatggcaccaccaaaggatgccactagccctccaacaacggtccctaaccaaagtggaaacttagagatgacaggtaaagaattcaaagcatgaattgcaaggaagctccatgagatctatgacaatgttgaaaatcaacacaaagaaacctctaaaatccaggaaatggaggaagagataaacaccttaaaaagaaatcagccagagcttctgaaattaaaaagctcacttaaagaatttcaagatacaattagaagctttatgaatacactagcagaagaaagaatttatcgataaacaagcagaagaaagaatttctgagcttgaagagcagtctttcaactgagtcagacaaaaatggaaaaaaaagaatttttaaaaacgaagtctttgagaaatatgggattatgtaaagtgaccaaacctatgaattgtctctgagagagaaggagaaaaagtaaacaacctagaaaacatatttgaaagaataatacaagaaaatttccttaatcttgctatagagagataaaaatctagatacaagaaatccatagaacacctgtgagataccatacaaagtgaacattaccaaagcatatagttaccagactgtccgaggtcaatgctaaagaaaaaatcttgaatgtagctagagaaaaagggcagataaaacacaatgggaactgcattaggctaacaatgaacttctcagcagaaaccttacaagcaaggagagattgagggcctattgtcagtattcttaaagaaaaaaattccaaccaagaatttcatatcgcactaaactaagcttcatatgtgaaggagaaataaaatcttctgcaggcaatcaagtgctaagggaatttgttaccactggatcagccttataagagatccttaagtgatttctaaacatggaaacaaaagaatgatatgtgctatcacaaaaacacacttaagtatataactcacagaccctacaaagcaaccatacaatagaaaccataaagcaaccatctaacaatttcatgttaggataaaaaaaatcatatatcagtattaaacttgaagtaaatggtttaaatgccccacttaaaaggcacagagaggcaagttggataaaaaacaagatccatctgtttgctgtgttcaagagacatatctcacatgtaatgacaccaataggctcaaagtaaagggctggagaaagatctatcatgcaaatggaaaacgaacaagagcagacattgttattcttatttcagatgaaacagcaattaaactaacaacagtaaaaaaggacaaaaggtattattacacaaagataaagagttcaattcggcaaacttaactatcctaaatacacacacacacccaacattggagcacccagattcataaaacaagtacttccagacttgtgaaaagacttagaaagccacacaataataatgggagacttcaacaccccactggcagtgttagatctttgatgtagaaaactaataataaaattctggacttaaattcaacacctgaataattgaacctaatagatattgacagaatactccactcctcaaccacagaatacacatgcttctcacatgcacatggaacatattccaagattgaccgtaaagcaagtcccagtaaattaaaaaaaaatagaaattatactgaccatactctcagaccacagtggaataaaaataaaagtcaataacaggaaaatcaaaaccacacaattacatggaaattaaacaacttgcttctgaatgacttttggtaaataacaaaattaatgcaaaaataaaaaatatctttaaaataaatgaaaacagagacacagcatgccaaaacctctgggatgcagcaaaagtattgttaagaggaaagtttatagtgctaaacgtctacctcaaaaacttagaaagatctcaaattaatggtcttacattatacctagatgaactagaaaaacaagaacaaactaatcccaatcctagcagaaaaaaataaataactaaaactaaagctgaattgagtgaaattgagacccaaacatccatacaaagaatcaccaaaatccaaagttggttttgaaaggataaacaagatcaatagatctctagctggattaacaaaaaaaggagagaagatccaaataagcataatcagaaatgaagaaataacaaaggtgacattgcagccaatcctacagaaatataataaaaatcagagactattatgaacacctttatgcacacaaaatagaaaatttagaggaaatgaatcaattcctggaatcacacaatgtcccaatattgaattaggaagaaattgaaaccttgaacagaccaatattgagttccaaaatggaatcagtagtaaaaaaaaaactactagccaaaaaaaactccctactggatggatttacagctgaattctgccagacatacaaagaagagctggtgtcaattctactaaaactatttcaaaaatcaaggagaaggggatcctccataactcattttacaaagccagcatcaccctgatgccaatacctggaaaacacacaatggaaaaagaaaactacaagccaatatccctgataaacatagtcacagaaattcttaacaaaatactagcaaactaaatccagcagcacatcacaaagttaatttaccatgatcatttctgggatgcaaggttggttcaacatatgtaaatcaataagtgtgattcaccacataaactgatgaaaaacaaaaaccatatgatcatctcaatatatgtgcaaaaagctttcaataaaatccaacatgtcttcatgataaaaaccctcaacaaactaggcattgaaggaacatacctcaaaataataagagccatctgtgacaaaactacagccaacaacatgctgaacaggcaaaatctggaagcattccccttgagaaatggagcaagacaagattgcccactcttacaatacctattcaacatagtactggaagtcctagcgagagcaatcaggcaagagaaaaaaataaaaggcccccaaataggaaaagaagtagtcaagctatctctctttgctgatgagatgattctataccttgaaaatcctaaagattctgccaaaagattcccagacctgatacacaacttcagtaaagtttcagaatacaaaatctatgtataaaaatcagcagcatttctatacaccaataatgttcatgctgagagccaaatcaagaatacaatcccatttacaatagccagaaaaaggataaaatacctaggagtttaaccaaggagatgaaagatctctacaaggtgatctacaaaacacctctgacagaagtcatagatgacacaaacaaatggacaaacattccatgctcatagattagaagactcaatattgttaacatggtcatacttcccaaagcaatctacagattcaatactattcctattaaactaccaaaatcattttcacagaattagaaaaactactctaaaattcatatgaaaccaaaaaggagcccaaatagccaaagtaaatctaggcaaaaagaacaaaaccagaagcatcacattacccgacttcaaactatactgtaagcctacagtaaccaaaacagcatggtatatgctacacacagaccaatgtaacagaatagagaacacagaaataaagccacatacctacaactatctaatcttcaacgaagttgaccaaaataagcaatgagggaaagactccttactaaatggtgctgggataagtagctagcaatatgcagaagaatgaaactggattgctacctttcatgatattataaaaattaactcaagatggattaaagatttaaatgacctcaaactataagaatcctagaagaaatactaggaaacaccattttgaacattggtcttgggaaagaatttatgactaaattttcaaaaacaattgccactaacaaaaaatttacaagtgggacccaattaaattaaagagcttctgcacaggcaaagtcaacagaccacctatagaaagggagaaaatatttacaaactatgtattcaacaaaggactaatatctaaaatctataagaaactcaaacaattgaagaagtaaaaaacaaaaaatttcactaaaaagtgggcaatatgaaggcaaaataaagcaaataataaataaaaaataggcaaaagacatgaacaggcacttcacaaaagaacacatttattaaatagggaatcctttctccattgcttgtttttgtcaggtttgtctaagattagatggttgtagatgtgtgatgttatttctgaggcctctgttctgttccattggtctacatatctgttttggtaccagtaccatgctgttttggttactctagcctcatagtatagtttgaaatcagatagcatgatgcctccagttctgttctttctgcttaggattgtcttggctatacgggctcttttttggttccatatgaaatttaaagtagttttttttttctaattctgttaagaaagtcaatggtagcttaatgggaatagcattgaatctataaattacttcgggcagtatggccattttcatgacattgattcttcctgtccatgagcatggaatgtttttccatttgtttgtgtcccctcttatttccttgagcagtagtttgtagttttccttgaagaggtccttcacaacccttgtaaattgtatttctaggtattttattctctttgtagcaattgtgaatgggagtttactcatgatttgtctctctgcttgtctattattggatacagggaggggaacatcacacactggggcttgttgggggttgggggcaaggggagggtgagctttaggacaaattcctaatgcatgcaggacctaaaacttagatgatgggttgataggtgtggcaaaccaccatggcacatgtaagcttatctaacaaacctctgcacacgttctgcacatgtatcccagagcttaaagtaaaaaataaacaaaaaaaacaaaaaaaacaaaaaacacacacatatatgtggccagcaaacatgaaaaaacacatcactaatcatcagagaaatgcaaatcaaaaccacaatgagataccagtcagaatggctattactaaaaagtcaaaaaacaacatggccgttgaggctgtggagaaaagggaacgcttatacactgttgaggggaatgtaaattagttcagccactatgggaagcagtttggcgattttttaatgaaaacagaactatcatttgacctagcaatcccattactgggtatacatgcaagggaaaataaatcattctaccaagaagacacatgcacctgtatattggctgcagcacttttcataatagcaaagacatggaatcaacctagatgcccatcaatgatggattggataaaaaaaatgtggtgcacatacactgtggaatattgtgcagccataaaaagaatgaaaccatgtcctctgcagcaacatggatgcagatggaggccattattctaagtaaagtgatggagtaacagaaaaccaaatattacatgttctcacttataagtgggacctaatcacatgtggacatacagatgtcaacaaaagacactgggactccaaaagggggaagagaggtagggaagcaagagttgaaaaactattgggtactatgatcaccatctgggttataggatcatttgtacctcaaatctcagcatcatgcaatatacccatgtaacaaaccttcacgtgaatctaaaataaaagctgaaattaccaaagaaaaatactagataatttttcaacttgctttattttcaaaagaactatgggaacctttttatgttacatccagtgacatacccagaatatttgaagctggagcaaaacatttttttttttaaaacatctcctctcatctatataacaaaattattttcaatagtaaccatgtaataatcattaaaataattattcccttgacttaatgtttattatttctagatgtagtctttaattttaaaacaactaacaaaataagaaaaataacgtttaatttaaaaaatagtccttacagccagtaaaacgtttcatgaacaagctaaaatttgcccttatcaaacaaaatgactaactttgcagtttgtgcactgtttcgctgttttaaatttcaaccacaaataaaaactccaaggagtcacataaaatgatagaattgaagtaactcaaattgtttctttgtctttaccatgattgtgctatccttgtttattttgactcttttgtttaactgagacttatgtagtgttgtgggagtcatatttgtgatctgtgctcaaagcaggcacccaaaggaagctgcaaatcttatctaacattacgaacttgctctcaaagcaactgtatgtaactgagtccttgtgtgagagctgaaggtacagctgaagttcttttaattaatttccatgtggaatataatgtttattaaaggataagtaataaatacatgtgattattttttattttgaaatttacatatacattgcccaagcccaacaattactgcaatgactgtttagaacttagaacaaaaaagattttttttttttcagggaagagtattgtatcactgacattatttagcatcccctgcacaaggaggcacatggcaatgaatggaatggaatcagatggacttttggttacttttagcattgctttcaaattctcttaggtaacacaccactcattgtctgcacatggggaaggccttgcccaccaccctgggcctgccattgcttgcagctctgatgggccacttgtctctgcataggggaagggaaaggagcttaggctgcagtctgaatttcagtggggaagtgggaaggggaagagaggtggagagggtagtggtggtcggtagaggaggagactaaatctgtgagttcagtatatgtgtgtgttctcaactgtgagctaagggcttgagtaggcaagcagcagattagcctgtttctgtcaaatcctgacacttgaagaaaacactgtaatttgatacaatgaaaaggtcttagatttcactaaagtcttttgaagaaattgcgacacaatcattggcgattgagtgaaatcttggaaatgaactaggcagcagaagggtggataaattcgggcccaggaagcactccctggactgtggtgttgttgctgatttctgctgtttgtggtgagaaacaaggttgggccaattaacaaagggaaaaagttaattccatgtttcttaatcagtttacatgttcataattgtttcgtggacatgtgatgatttgttacttgactgatacttcccacaccacttcctcaagttcaaactgcaatgtcccacatcacttctgttggtcaagtcttaggcactgccaaatcttgatccactcattccctctctgcttttcctccatcttccctattccagtcaaagacaccttccatttcacctttgtgacctcttaacctcctaatcaccacatccaatttgtgagcaagttctgtttgctgcctgtaaaacatactctagatctgactcttacctcctctacccttatcaatcttgtaccatccttgatgtctccagtctggactctatccacgccttctctctggtccttctgcttccgtccttacctccctgtggtaattcaccatggcattcattaaaaattgaatcccttggccggacatactggttcacacctgtaatctcagtaccttgggaacctgaggtggggggatcactgtaggccaggagtttgagaccagcctgggcatcatagtgagacactgtctctacaaaaaactaaaaataaaataagttagccaggcatagtggttcatgcctttagtcctatttactcagtaggctaagaggggagcatctcttgagcccaggagttcgaggctgcagtgagcagagatagtgccaccgcactccagcaaaagtggcagggtgagactctgtttcttaaataaaagaaaaaaaaaatgaatccctttatgtcattcctcagttcttaaaaccctcaagtgttttctactgcacttggaataaaatctagcttctttactatcacctagaaagctgcaaagcctgcttcttctcatttccagtcctcttctcaaatgctgcctctaagatgctttctgagcttccacgactcactctatagctaaccccttggcctgctttgctgttcagagagatttttccagtggctgaaactgtatttgtttgcttttggtctccccatactagactatgagctgtatgagggcagggctttatctttgccactgcacctcagtaaatataatagtgcctggcccatagaaggcattgaatcaatacttgttgaatgagtgaatgtgtgaatgatgaatacataaaggaatacacagcctcctaattcctttacttatgtcaagacgcaggatcaaggctctcattctcctgcaatcttcccctatttccctattgatattgacttgctcctttctctggactaatttatacttacctgtaatgtgctgcttattttattctgccttatggaagtatttgcttacttttcagtctcccttcccagctgcatgatccagagagccaggcctctcctttgccatctatatatcctgagcaggccctgcagatgggtgtgcaagccacatgtttcaataaagggcttaactgatgttaaagggttttaaccatttaaaaaagaatttatgtgctgcaaaaagaaccttacacagatctgcattctgaagtgtatttgaattgcataaagctataatttggcctttaattttattctaatgcccacttttaaactctgcctaaggagtgttttttgtgttgtggcttggtggccccatgctgacctatttcatttccagctgaagggacgctggaatcctagtttgaaaattcaattagaaagaattaaatttaaatatataatatcaactaaaaccatatttttttctcattattggaaagcccaagagagcataaagcccatactgattaaagatctctgctcttattgacaggcaatgtcaatatataactgcacataacaatatataactgcatataacaaacagtttcctagaacaatctcttatccacaaggggggaaagtcattcccagattggatgttttttgtttgcttatttgtttatttagcaaatctaaacgttcatttgttgtcttaggatctcaaacattttaacttcatttcaattactgaacttaaatgcatttcttttgaaagcagggcaaaacatccgcgatagaaagtgcacagcaccaacaaaacacacctgcctcacagaatcttatatccagcccaagaaaatcatgcatcatttagaaccattgtgcgttatgggctacatatttctgctgttcttgatgctaaaatgagatgtttaagatgttccctaattctttcacctggctttggagggaaggtaagcaaaggaaatatcacctctgcgtagtacacatggacatttatttttaaaatagctttgatttttgaataaccaaagggagtaatagaagtacagggatttctttttctctttgatattttctaataggaaatttcagaaaaactatgaagaaggaaacataattaacttttcaagccacatttcaattattttaacaatcaacttgggtttctttctttttcccttgcgttaatctgccatcctgtaaatagggcagataattaggtcatgagaaaaagaaaagaaagtctgagataaaatccattaaattgcaaatttcaatattactgcaagtataaaaaacagcaaaacaagtattttatgtgtatttattttaagctcatgctattttagagataatagccctatctataaaataatgtgagacatacagatatgcctgaaacttttataatatcatatttcaattcattgagttatatttctagagccaaattaatacatttgtgctgaagtttaaaaaatgacattagcttattataagactaatactgcaacaatgaacacttatttgtataattttactccaaaatttagatatttacaaataatggggtctatgtataacagaataagtacatatctagtggttaaaagcacgtttttcttttgctgacagacaatttattccagttctggcctcaccatttactaaccatgtaaagttgggtgaattacccagctttggttagcgtttttggttgtgagccgctaagactctggcttacttagggatagaaggaattaattgaaaggatgagagatgggaaaacagacaggtacagggaaacgagatagcagagcacagctgggaacctatgcccggcacatgtgtctaagggccgctgtcatcatacccggacatggttgcctttactgcactagacactaccatggccacccttggcaaataggatggaggcctgtagtgttggagagccccaggattcagtccttggtcctcttctcgtcaccatttatgcaattcctttgtaatgtcacttggttttaaatattatctctttgatgctaactcccaaatttaaacctctgtttggacctcttctctgaaccccagactcacatccattcagttgcttacttcaacgtctccactgggctatgccagagaaaactcaacacaacatgtccaaaaaacttcttttcttcccctcctccttcagcttgcatctgtcattctcatttcagttgagtgactccacccttccccttcttcactcttttcttcttctcacatctcacctgcagtccattagaaaattctcccggttccattattagaatgcatccagaatctgacctcttctctcctctactgctcctgcactgattggagccaccatcatctctcatctaggctgtcgcactagccccttgtaaaaggcttcttgcgtctatctttgactccatccacctctgtcatattctatttttagcacagcagccagagtgatcatgttaaaatgccaatcaggtttttgtttgaagatgattttcattgaacttggctaaatagctaggaatgagatttctggattgtatgataagtgtatgtataacattataagaaactgccaaattgttatccaaaaatggccatacattctgcattcccaccagcaatgtataagagttccagttgctccaattcctccccagtgcttggtatttccaggctttgttttgttttgttttccatctaataagggcatagtgataactcattgtggttgtaagtcgcacttctctaatgacaaatgatcttgagcatctttccattatggttatttgccattttgtatcttccttgatcacatatttactgaaatcttttgcccgtgtaaaatttgggttgctttattattatggagttttgagagttctttgtatattctagatatgtcctttattagatatgttatttacaaataccttctagtctgtggcttgtctttttattttcttaacagtgcctttcacaaagcagaagtttttaattttgatgaagttcaatgtatcaatttactcttttatggatcatttttttttctgttatagctaggaatgtttgatcaactaaggtcatacaaatttttctagaagttttatagttttcaattttacatttagatctgtgatccattttgagttatgcaaatttttatagcagctttattcataatttccataactagaaacaacccaacgtcctttaactagacaatggagaaacagattgtcgtatatccatacaatggatataaaaaaaactaagtatcactacacacaatggaagaaatgaatttcaaatgtattacgcaaagtaaaagaagtcagactcacaaggctgcatgctatataattccatttattttgtattctggaaaaggcaaagctataaagatgggaaacaggcccttgccaggaactggaaacaggggagaggggttgactacagagacaggagaatttttggaagtgatagaactgttctatatcttgattgtggtggtggttgcatgactgtgcttgtttgtcaaaactcacagaattgtacacaaaaaagaataaactttatactatgtaaattataccttaatagaaaataactgagttgtacatttgttacatttgatgaactcccaatgacatgtcattgtctcctagactccttagtttacccatagtcgaacccattagggttccttcttggtgctgtacagtctatgggtttagacaaatgtgtaaggaaagtaagttcatcagttgtaacaaacgtactagtgggggatgttgacaatgggggatgctatgcaacagtggaggcagagtgtatatagggtatttatgtacctttctgtcaatttttctgtgaatctgaaactgatctaataaagacttttaaaaataactaaaataaatcttaacttggtaaataataaagtgtaaatcagatcattaataccttggctcgaaacatttcttctgggaatgaaattttaaaaattcaaagaaaatacagtagcatctgctggacacatcataaactactagttaggtagttaatagttttagcattagactgtgtgacattacttttgatgatattacagttttgcaaaaaaaaggtacaatcttagaaattaacaaggaagcactgcatgaaaattaaagtagactaggaaatgagagtggcaaggtccaatctgattgtaagaatcgagaagttgtaacattgcccaacaggacacctgtcaaccttaaataacgagattcagaaaatatgattaagtatggagtttatttgagcacaaagattgagaatggcctccacagaaacaccaattccgaataaatggggtcagcattccaaagtggaaaagttaaagttttacttacataggcagagacagagaagttccagaaggattacaatttctttcttctttttctttctttctttcttttttttgagatggagtctcactctgtcacccaggctggagtgcagtgacacaatcttggctcactgcaacctctgcctcctgggttcaagtgattcttatgcctcagcctcctgagtagctgggaccacaggcacacaccaccacgcctggctaatttttgtatttctagtagaagcggagttccaccatgtttcccaggctggtctctaactcctgacctcaggtggtccgcttgcctcggcctcccaaagtgctgggattacaggcatgagccaccacgcctggccaggattacattttctatacaagatcagtgtgtatgctatggtgattcgattgattatagattgctatgttccaaggaagatcagtttattactccatgaggaggggcaatgatctgaggaggtctcttttctctggtgccatttaatcttaattgtttacaggaaataaaaaaggcagaggttgcagccatatgccatgtgactcaagctgcatagctatattcctctcaaggcttggaatgatttaagttccaacagctttaagtttgaatatttaatttcacatttccccctttttaatgttttatttttatgggtttttgaggaacaggtggtatttggttacatgagtaagttttttagtgacaatttgtgagattttggtgcacccagcatctgagcaatatacaatgaacccaatgtgtagtctttttatccctcacccccttcccaccctttcccttgagtctccaaagtccattgtatcattcttatgacttcacatcctcatagcttagctcccacttatgagtaagaacatatggtatttggttttccattcctgagttacttcacttagaatagtagtctccagttacagccaggttgctgagagaaatgagacaagagaaagaaataaaggccatccaaattggtaaacaggaagtcaaactgttgctgtttgttgatgatattattgtatacctagaaaaccctaaagactcctccaaaaagctcctagaatgaacaaaggaattcagcaaagtttcaggatacaaaattaatgtacacaaataagtagctcttctatacaccaacagtgaccaagttgaggatcaaatcaagaactcaaccccttttacaatagctgcaaaaaaagtaaaatacttgggaatatacccagccaaggatatgaaagacctctacacggaaaactacaaaacactgctgaaataagtcataggtggcacaaacaaatggaaacatatcccatgctcatggatgggtagaatcaatattgtaaaaatgaccatactgccaaaagcaatctacaaattcaacgcaattcccatcaaaataccaccgtcattcttcacataactagaaaaaacattttcccctttaaattgagatctttcaaagaaaggattttagatgaactcaaatggttttggctcgtattatgttcaggagcttagtccgtgtcttcaggaatgctcattcccagtgtcatgtttcagagtagggggctgggggagaaggaagttttcaggctgcaaagctgacaagatacagatcaaatttaaagtaacaggaaggaagtgactttgtgatctgcatctttcattaatgcaattatttgagtgaccattattttagtttgttcatttgtgtgttgtgtgttgacttcattgtgaacaagtgccacagcagcaataaagacaaaagcaggacaaaacacacacataattataattctgatagtaagtaacagctagtgccaccaagtttcacaagatccaaatgagcttcttagccaattatttagggtagttgttggatctgaaaggttagttatttgggcttctgtatcagccattaatttagtgatgctatctgattcatctagaatatagatgccagactcagtctttatgacagtgcaggcttccttacggctgcattgaggatgtctaaagtgatacagttctgtaagacgacctttctcataagagcaacttcattatttaataatgagataatgagagacccacgtagatattatttagggtcttttttgtgtaattggttggggcctcttatgctagttgtggctagaagatggaagctaaatgatcatctcaatgaaatacataacaaacccactgaaattgtaaatatggaagatttgcaggctttaagagggtatgaactgtttgactttgtgtccaggcaaaactcaaaagaataccttccttacatcctgggagtaatcatggccatagattggtaccacatacccaagacatttcatttggagcaagccaataagtacgtggttattgtgcccatttagggacatgccaattagcactgtgtaatataatggtgtgtgaacatactgttccttgggtaactactccatgtccctagtgctgttgggccatgtgtttttggtgtagttctttggtctctaccataaaaaggagagctgactaagctgaccaaaagagggggtaagccagatacagccatttgtgttatattatcaatttgtgttataccatccccaaattgaagtgtcttatctctaagttggagcgatgccagcattaaagctaacaaactgggtctcctttaccaaaaggctcttcccacgccatttgctttgtaaagagttatcaatagggcagtgatgcacaccatccttagtcatactagtgctaagcattggtgactcttcttgagaaacacaggtatatttctgatattttatcctatcttgtctttggaaaagagatacacacatagcaggccagagccactaagaaggggcatgaggttgaatattcaaaatgtgactttaaaaaaatttttgttttattaatattatttttctgagacagggtcttgctctgttgcccatgctggagtgcagtggtatgatctcagctcactgcagcctcagtctcctgggctcaagtgatcctctcacttcagcctcccaagtagctgggactgcagacacacatcaccatacctggctaatttcctttgtatttttttgtagagacagggtttcaccatgttgtccagactagtcgtgaactcctgggctcaagcaatccacccacctcagcctcccaaatttccgggactacaggaatgagctaccgtgcccggccaaaaaagtgctttttttttttttcggtaatttattagcacagtcgtgagcctgttgccagtagaggtttgcttaatgggcaacagctggtaatagcagcaacaaaatatgagaattagggatgaaaagaaaaatatttagtgggaacttgcacaggaagactttctccatctattgacaagtattaatattaagcaatagtttagatgctggtgtgatctggtaccttgggaacgctgactagctcagatgttgtcttcttatccttgctgcttctgtagaattttaattttagttcacctgtttgagatgaagtccaaattggacttacgacttcacatcctcatagcttagctcccacttatgagtaagaacatatggtatttggttttccatttctgagttacttcacttagaatagtagtctcctgttacaaccaggttgctgagagcaatgagacaagagaaaaaaataaaggccatccaaattggtaaagaggaagtcaaactgttgctgtttgctgatgatattattgtatacctagaaaaccctaaagactcctccaaaaagctcctagaatttaaaggcagctctctttaaatggatgatgggcatccaggaattgataccttttagcttaatgacaaaaggtttggttaggagcaactcataaagtccctttcaccttaattggatgaagtcctttgaaagacattgttcccaaaagacaaaatctcctggttgaagtccgtggcccttgagtttttggtctcccaggagctcactgtggaaagagtcttttacttaattatagtttttagttagctgccttataaagcctctacaatagtaaaacatacctcctttgagtatcatagattcgcaatttcctagagacaattttataggtctgcctgttataatttcaaatggatacaactggtgtttataaaaagggtcactcttaggttaagcaaaaccaataaaagggtctttggccaaaaattgttaagacctcagttaattttgccaactgaattttgattgttccattttttgtgttccactaacccatatgactgggggtgatatgcacaatggaaatgttacagaatgggccagattttgattgtttatccagtaaagtgagtatctctgctagtttgaagttctaggttaagtccccaagttgtaacatttttttcttagagaatttgacttactgctaaggtttttgctattctgcatggatagcttctactcaaagagaaaacatgcaggcaatcactagactgtacttgtattcttgtgagggtgatagctgaataatatctagttgtcatacctcaaaagggccttcttacaaaggaggatgaccttaagaactatgtaaaggtttccctaaattatgttttaggcagatgtggcagcgattcatgtaccttatgagcaacagttgaagatttccaataatattgtttcaatcaacaataatatttccaataaacaacattgcaatcatcttatcggggctcctatgaattaacccatgcacataagctaggaaagatgacagtaacttggctgtgagtatgggtaaaccatttggtctttaccatagcccagtctcagaggagtacatttgcccaattttcttgttctgtttttggagctttggattgagctaattgtttattaaaaaatcaagtgcttccttaaaagctaaaatgggttgattttcttattcagatacatttagggcagccctttctcttatactatctgccaattgatttccattgctttttggctttctgggatgctttactttgaatggcctggaagtttgacaatgactaatgattttggcaacagtatggcttccaatatttctgaaacaaggtgtccatttttaatgaactgattggaaaaggctaaaatactccttgttttcatagcattccaaagtcacaagcaactccaaaagcgcgtctgctatctgtataaatattagcagttatttcttttgccaatcgacaggctctaattatattgattctgcttgttgagtcaagtttgttcctgaaagataagcgctttctatttcttcagtcaaaaatgctatagcatagcctgcgtgaaaaattccagattcatcctttaagtgagagccatctgtaaaccaaataatatcagtaaggcaggattcttacaggtcagtcctagaagagagaagctggttggttaagactatgcaatcgtgtaacatttcgtctgaaagcaggagtagaagtgtggcaatatttagattattacatctggaggcagtattacggagagcagaaagaagaacatcatgagaagccagtatactaagtgaatagtgttgagtgtggtgtaaatttagaagcacttccatagaatgtggaacatagacagtgaggggatatcttatcactatttctttagttgcttttattcataaagtaacaattattgctttcatgcaaagtggcaattctttagccacagcttcagttgttgactatagctacagttctattttgatctctgtgtttttgagtcaaaatgcctaaggtatttccctgatttttcatgaacgatgaaaatgaaatattctaatttggatgtcctaaggctggggcatctataagactttttaaaaatttcttttgatgtcatctgatttttttctgtccattccagggcgtctggcttgtcttgttttaaaagagtttataaaggttaagtttttaaggagaagtttagaatccaatttctgccgtattctgccaacaccaaaaactttctcacttgcttcttagtttttagggtagagaagaccaatattccttttattctacccatattaataaaaagggcttcctctgatattaggtgacataaatattttacttgtttttgatagaactttagtttttcctttgaaacttgcatcactttaaagctaattgttgtaattccaacctctatggaggctttcctatcccctgagaagtaaattatctacatactgtatcaaggtggatttcttaggaaagttgatatctgataggtctgcttttaatatttgtaaaaaataagttgggctctcactatatccctgaggcataacttccatgtgcagtgtctgtcttttcaagtgaaagcaaagagaaattgaccatctttatccacaggagtgctgaagaatgcactatctaggtctatcacagcaaagaattcaccttcagttaggatggcagtcaacaacatataaaggtttggtaccactggattttgaggaatggctacattattacttgctctcaggttctgtacaaatctccaccttccactatttggctttcttatggtgagaatggaagtgttacatgggtttgtacaatgaataatcaagcctccttttatgtaattcaaaattatgttttttcccttccaagacctctgagagggtattgcttaaggtttgaaagaggttccgatggacttatttacattttaattggtactatttttattttttgtaaaaacaggagcttgctttgtttgctggtctcaagctcttggcctcaagcgatcctcccactttggcctcccaaaatgctgggaatacaggcatgagccaccacacctagtctatcaggtactatttttaacagcccttgtcattcttctaaaacaatttagtttcctccatggcaatatgaattgcaatttgtgaattggaagaatcagatttcaaaatttttttgaacctaataattctattttatcttttaattctggatacatttccccccttttgaaagagagagatgtgggtatttatttgtaaaattcttaaaagtcttcatctatcaagtggatggggaatgaggaaaccaagagggaaacatatgtttaggagatctaactgaaaaactatagtttgagatttttgtgtagatataggggtatttcttaaacctaccacttgtatggctttttcactccaaggaatgggaccttgtataaggtgggatttatcactgataatgtagcttcagtattaaaaagagctgatgttagttcttcatttaaattaatttcaattttcccatggtattactgaggataaaagagaaagtccctttgatttccttggatcattcctattcttctcttcctttgacctgttgctgttctatttaaaatttctataatccttttgaaatgttcaggctttttttttcagtatttggaaaatgagggattaggtcagctttggaacttattaggctgtttaggggttaaaaatttgttggattattgttttagtcataaactcatgatcttatttgcttcttctttctgtttaacttcccctttctttccttccttacttagggtacagggtatttgatcagcaaaattaactagatcatgagtttgagaagtagcccaatgagtgatgtctctattatagtggccaattcttcatgtaatccatttatgagtgcatcattttgatggttagcataaatttcttctgatagacccaaatattgtttaaacgttgttttcaaatattttctagtatgatattactgactcatcaagattttgtcaacattgttgtgttttgttccaatcaactactctttggaaaattaacccattatgctggagattgcaatttttcaaatgtttgcatgagtgagaaatcagaccttggcaatgaccttgagcaataggatataaaaaactcccacatccctaacgttccaataatggaacactaggcataagggggtcaaggggataatgtgtagtgaagttttggcagccttgcaggtgcatttactgcctgcttcagaaaattcacataagtcctctaaaggattcctccaattttcctttgctatccagtccttggctttactttatgacactaacatgtgaaccaattgatataaatcagagaatctggggccataagttcaagtgtttaattcacattctccagaaaattccttagggtctggaagagaatctgagaattctttaattattcctttaacaacaacaacaacaacaacaaaccattaaaaagtaggcaaagaacatcaacagacatttctcaaaagaagacattcaaatggccaataaacatataaaaaatcctgcaacatcactcatcatcagagagatgcaaatcaaaaccacaatgagataccatttcacatcagtcggaatggctattgttaacaagtcaaaaaacaacagatgttggcaaggttgtggagaaaagggaacatatatatactgttggtgggaatgtaaattagttcagccactgtggaaagcagtttagagatttcttaaagaagtaccatttgatgaaacaatcccatggtggagtatatatccaaagaaaaataaaccattcaaccaaaaagacagctgtgctcttatgcttattgcagcactattcacaacagcgaagacatggaatcaacctgagtgctcattatcagtggactggataaagaaaatgtggtacatatacacaatggaatactatgcagccacaaaaagaataaaattatgtcctttgtagcaacatagatggagctggaggccattatcccaagtgaattaatgcagaaacagaaaaccaaatacctcatgttctcacgtttaagtgggagttaaacactggatacacacagacataaagatgggaacgacagacactggggacaccaaaagtgggcagtgaaggagggggtaagggctaaaaagctacctattgggtactatgctcactattttgctgatgggatcaatagaagcccaagccttagcatcatgcaacatacccatgcaacaaacctgcacatgtgcccccaagtctaaaacaacaacgacaaaatatgcctttaagttctacttttgacagtggttggtaaaccaaggcagattctccctactcgacacagagtattcctgaaatacagccagaacagcagaaggaagaaaaggaggagggaaggtaagtctggacaaggaaaagacaagaggagctgaagaaggggagagattttaggcagtctttttaaattcagaaacagttttagacaatctttcatgttcttcttgcaaagaaatgagttctgttttttgtttgtttgtttgtttttgttttttttttgttttttttttttttttagacaggttctcattctgttgtccaggctgaagtgcaattgcacaaccacagtttactgcagacttgacctcctgggattaagcaatcctcccacttcagcctcccaagtagttgggactgcaggcacataccatcacactcagctaagtttttaaattttttgtagagatgaggtcccactgtgttgcccagctggtctcaaacttctagggtaaagtgatcatccacctcggtctcccaaagtgctgggattacaggcttgagccaccatgcccagccaagaaatgactttatcagaacctcttttagaagtttccaagtcccatttaaatagttttctcttccagtaatcacctacgaagcaggacaagaaaaaaataaataaaaataaaatagctctccaagttattttgtttcattttagagctggccttttctatttgagtgtaaaggtaaattaggtattcaaaggtacccccttttaatcattgtaatttggggtcatcatgaattatgtgagaccatttaaaaatatatttgcatgtatgaaacacaaatctagctggtgtttccacaggtggatcttttctggaggaagaagacatgcttttagaagcataattgctcataatttagactcttcttttgaattaccaaaatgacctcgggggtatgtcttgaatcgagtgtgatgcttgtgagaatagctcctcaaggggccatccttgagtcagttctttccttttacatgtcttggtggttccaagagacttgggtgcttaaggcaccaggtgctcaacctttttgtgtgcccactggattaagcaaggttccctgcatattcttcctaagggattctccgtgagaacattttacattgaaagcaataaactcccatagttccaggagattttagtcacctaaggtgccttttggtcaggagaaagtgtctcttatcttctaggctcatagccttttactattttgatcactcaaaaatttgtcaattgaaccaagctttagaatctggccagttttaaagattaaatttttttttttgcttaagtcacaaagattcatttctacttttcaaagagaaactgttttttccctgactatgatttggaatgagagaaatggttgaaaaactctaaggagtaatttcaaacaaaattttaatttcagagaaaagtgaaagttacaaatccacaattagcagactttttagagaataaaaaatgaagcttctactttgcagtagaacttcaatttcaaccccactaagttagaaatgtgtgtagctcaaataaagtctgtatcttcaaccaaggccaggagaattcacacctgagagggccttaccagagatttgttttgactctggtgaagtcagatgaacaaaggttggtcatcctggtaccaaggcttcagttgtcagtgaagtgacgggggttgctggagggctgattcagatcccttcatggttgccaaaatgtcaaccttaaataacaagactcagaaaatgtggttcattgtagagtttattctagtgcaaagcttgaggatggccagccagaaacacagactccaaatgaatggagccagtgttcctaagtggagaagttacggcttcatttatatgggcagagacagaaattttagcagcattacatcttccataaaagaccagtgtgtaagccatggtgatttgattggttacagattgctacattccaaggagattactttattactctgtgaggggagaaaaatggtctgaaggagtctcatctctggtgccatttagtcttaattatttacagaaaaaaaaaagacagaagtagtagctgcatgtcacatgactcaggtcacatagcaacattattctcaaggcttagaataatttaaagtttcagcagctttaagtttgaattatttaatttcacatacccattctgttaaaaagtaattttgattctttagactccttagtcttttgtgactaaggagtgctggtggtgtgattaaggaccattattcgggtcaactcattttaattcatacgacagggactttcctaaacttaggaagagggcagagacattgactagccagaacaaaagaacaaatgttcacatttgtaaacagagatgtaagctccacacgcttcagtttactcataaagtggaactaccaatagcacctacatttcaagggtatgttgaaaatgaaatgacctaaagcctagaaagcagttagctgagtgccacatactcaaagtgctcaaggtaatctaaataggtatcttatctttaagatgaaaataacccaactgaaatgtataggagctgtagatggttgaattcatcaagaacaattcatcaagaattcttaaatctcatacacatcttagctaccttcacatgttaaattttcataaggtccttaataaattagagttgaatttaattattttttaagtattctgttaaaatgaagaataagaccatctcttccattaaatgtcttatcccaaaggggtgataattaatacaaaaagtagaatctgactgggtgctcatacatgcagagtacagaagaagaatgaatcagcttgggttgggatggtggaaaaggtgttagtgacaagctcatccttaagctgactcctgtatctaacactgtgggaatttggagatactgatttttaaggtggaggggaattgataatttagtggtgtgtgtataaggtgtgtgtttataatttaaggtgtgtataagggatttataacttagaagttgaaaaggaagcctgagaatgtcagcagttcacctgttggtcttctgcatacattctggttaatcctaggctgactaggctgactaccttttttttttttttttttttttttgagacagaatctcactcttcttgcccaggctggagtgcaatggcacaatctcagctcactgcaacctccgcctcctgggttcaagcgattcttccacctcagcctcctaagtagctgggattacaggcatgcatcaccatgcctggctaattttgtatttttagtaaagacagggtttcatcatgttggtcaggctggtcttgagctcctgacctcaggtgatccacctgccttggcctcccaaagtgctaggattacaggcatgagccaccgcacctggcctgacttcccatttttttttaaaaacagcatcatcactttcctggtgcacaaaattgtcacagcataatgtttaatttgattggtatgacttcagggctaccatttgtctcatctatttttcctttcccttcaaaaggttttttttggtaatatttagaattgtgatgtaattttctcttgctctatctaatattctagttacttctgttcttattttaccccccattttccttgaaggcaagaatactcatgaacctgctgaaatgtggtaacagtcttgcccatgtttgatgctaaataagaattttttggttataggagaataatttattactgcctttttttttgttagctgatttctctcctttgtgctatttccagaatttgcacctctacttattttgctgttttattctatcacttcctaatccagagctttgctaacaagattcccagctgctttaaaaaatgctttgagtaaatgccagaaggtacaagtggcatttactcagaaaatatttttagagcagctgatggtgtttacagttagagtgataattgaaggcatcattttcaattcagaagcaagtaaacaaaagggtcttctcagcttgaaatgtgttgtctttttaaaacatttgtctagcctggaggagaacagcagtattaacatattctcactctccaccttctacttgacaccatcagccacattcttacctagaagaaaagcacatagtcaaacagtttgaatttaatttgcttttctgttgatttttttaattaaaaaacgttcttagtaggtaacatatgtgcatggaacaaacacaaaaagtgaaagatactacacagggaataggaaaactattttctaccctgtcttctagcaatctagtttctttcccccgagataaccactattagtgaattcttatatagtctttcagctaaattttaaatatacacacatatgcatggagtacatattttacccagatggcacacaccatcatgcatcttgcttcttgtcagttaacaagaagagttggagagcctattacatctttatatgcagacctggtttatctttgcaatgctggtgcaatcttttatcatgcagataaattctcatttattggatgtatctttactgataaacatttatgttgttttacaatcacaagtaatgctgcaattcatagccttgcacacatgtcattttgcatatctataaaatatttaaagatgcattttatcatttatttctgagtcaatggcatgtacctttttagttttaacagacagagctgacacaccctcactaggtactgtactcctttgcatgcccattagcagacctgtttctacatacttcctgcaaacttgttatcaaacttactgactttaccaatctgataaatgaaaaaaaatgaatttcattgtaggttaattttttttgttattgagaatgagattgaacattattcatatgcttaagatttcctaccctttttgctcacattctttctccatttttatatgttattactcctttatcaacttgatatgtagtaatcaagaaaatgagttctatctgtaatatgtgctgccattttattcatagatgataatttgcattttgacttttttttttcttttttgaaatagggtctcactctgttacccaggctggagtgtgctggcaccatcttggctcacagcagcctcaactcctgggctcaagtgatccttccacctcgacctcctaagtagctgggactacaggtgcacaccaccatgcctggctaatttttgttttcgttttgttttttgtagagatggggttttgccacgttgcccaagcttgtctcagactccaggactcaagcaatccatctcccttggcctccctaagtgctgggattacaggcatgaccactcaacccagcctcattgggactttttaaagaatatttttgtgttgctgaaattatgattttttttgtgatcttttatcttccgtctctctttttcctgcctctatccttcccttcttaccctaacactctcttcctctctccattccttctcttctttatgtcttcgtgcttaaaaagacttccttcatttcaagattatgaaaaatcatgttttagtttagtgcttttggggctttgtttctacatttatattttttatttttccaaaatttatttagcacaggcagagacgcagatatatatctttctccagaagccacttagttgtttctgcatcactcaatggataattcatctcccccgctgatatgcagaattgtctttgtcatataccagctgccagtaaaatttgggtttactttgtaacgctttttttctgtttcactgggtttctgtatttgagggcttttattatacctaaaaaatatcttgtaatacctggtttaaacagttcttcattcatatgctagtaatttttgcttgtttattttttcataaaatttagaatgttttaaataattaagaattcattctgttaaagaaattctattatatataaaatttgctttgaaaatttatttcttatatttttgaattaatttattttaactttattcattcaattccttcatatttccttagtattagtattcctatttcaatgaattaaaaaatgttacttatcctttctacctcaaaagaaggtgtgcatttttttcatattcttaagtaacattttaatattctcttcatatacatgttgtacgtttgttgtttatttctatccactatttcttctatactcaacatatattactgctttaactgggatcatttcttcctcataacttctgttttggtgttatttatgtaggagtagagtatttttgcatattttgtccccaggcagtttcttaattctggttctaatagttttccagtttattctcttgggttttccaagtatacagatcatatcatatacaatccataataatttcaccaccttctctccaatttaaaaatatttattacttcctcttgcctaaatgcaatagctaggccccccaaaacagggttaaataacagcagtggttgtggacatctttgccttgtcacacatttcttactttcccatcaatcaggaggtttctatgtttgtatgagatagataatcatattaagaaggtagtcttctaatcttagttaattaggaggctgtttgcttgttaataagaataaatattgaactttattaaatgcttttcactgtcagagacagtcatattttctagtcatttctattaatatgttggaacgtaatgataaatctcctaatattgaaacaaccttgaattcctagagtaaacactacttatccttgtggtgttgctatttaaatgtgctgccagtttcaatttggtaatattatattaggatttatgcattgggttttggcactgttccttgtaagaatttagaatgttctctgctttttcagtgacttgaaatagtttacatacatgttgagctatctactcttgaatggtttggtagaattcttctgtgaatagaccagagccttgaactttttggggggaacataattctttgacgtttttctcaattgtttctatagtgcttagtctggttgcattttttactcttctagggtcacttttgacaactcacattttttagagatgcatcagtttcatatacattttgcgactgaacaaagtaatcacttatgattctttatatttcctttaatttgtattatttacctactcttgttattttgaatatttgtacgttctcattttcattctggatagggttagctaatagtttatctattttattatgttcttctccaaaagaaaatttgcttttaaaatttacttatttatgtgttatatttttgaattaatttgtttattttaattttattaattcaattccttcattcttatttccttagtactaggttttttctttttttaaataatgctcaactttatttatttatttatttatttatttatttcaataggtttttggggaacaggtgttttttggttacccggaaaagttctttagtggtgatttttgagattttggtgcatacatcacctgagcagtgtacattgtacccaatgtgtagtcttttatcctttaccctcctgccatccttcccccgagtccccagagtccattgtattattcttatccctttgcatcctcatagctttgctctcacttggaagtgagaacatatgatgttgggttttccatttctgagttacttcacttagaataatgatctccaactccatccaggttgctgcgaatgccattattttattcccttttatggctgagtagtattccatggtatatgtgtgtgtatatatatacacacacacacacacacacacacacacacatatatatacaccacattttgggctgggcccatatttgtcaattgtgaattgtgttgctataaacatgtgtgtgcaagtgtctttttcatataatgacttattttcctctggatagatacccagtagtgggattgctggatcaaatagtagatctacttctgttctttaaagaatctccatactgttttctatagtggttgtactagtttacattcccatcagcagtgtggaagtgttccctttttgccacatatacacaaacatctattatttttaaattatggccattcttgtaggagtaaggtggtattgcattgtggttttgatttgcatttccctgacaattactgatgttaagcattttttcatatgtttgttggttatttgcgtatcttcctttgaaaattgtctattcatgtccttagccaactttttgatgggattatttggtttttttcttgctgatttgtttgagttccttgtagattctggatattagtcctttgttggatacatagtttgtgaggactttttaccactctgtgggttgtctgtttactctgctgtttatttattttactgaccaggaactagtagtttaattaagtcccatctatttagctttgtttttgttgcatttgcttttgggttcttggtcatgaagtctttgcccaagccaatgtctagaagggtttttccaatgttatgttctagaattgttatggtttcaggtctcaggattaagtcttcgatccatctttacttgatttttgtgtatggtgggagtggaggatccagtttcattcttctacatatggcttgccaattatcttggcatcatttgttgaatagggtgccctttccccactctctgtttttgtttgctttgttgaagatcagttggctgttaagtatttgggtttatttctgggttctctattcagttcccttggtctatgtgcctgtttttatgccagtaccatgctgttttggtgactttagccttatactgtagtttgaagtcaggtatctttttcttagtcttgctttgggtatgtgggctcctccttgattctgtatatattttagggtgtttttctagttctgtgaagaatgatgatagtattttgatggaaattgcattgaatttatagattgcttttggcaatatgtcagtatggtcatttagacaatgttgattctacccatctgtgggtataagatgtgtttccatttgtttgtgtcatctatgatttctttcagcagtgttttgtagttttctttctttcactttcttgattaggtatattcctaagtattttatttgtttgcagctattgtcaaaagagttgagttcttgatttgattctcagcttggtggttgttggtgtataaaagtgctactaatttgtgtacattgattttatatcttgaaactttatcaaattcatttatcacatctaggaacattttgggtgagtttttagggttttataggtatatgatcatatcatgggtgaatagcaacagtttgacttcctctttaccaatctggatatcctttatttctttctcttgtctgattgctctggctaggacttccagtactgtgttgaatagaagtggtgaaagtgggcatccttgtctccttccacttctcaggggggatgctttcaacatttccccattcagtataaagttggccatgggtttgtcatagatggcttttgttaccttaaggtatgtcccttctatgctaattttgctgagggtttttatcataaagggatgctagattttgtcaaaagctttttctgcatctcttgagataataatgtatcttttgtttttaattctgtttatgtggcgtattacgtttattgacttgtgtatgttagatcatctctgcatccctggtataaaacagactagattatagtggatttttttttgatatgctgttggatttggttagctagtattttgttgaggatttttgtgtctatgcttatcagggatattggtctgtagtttcctttttttattttatcctttcctggtttggtattagaatgatactggtttcatagaatgatttaaggaggattctctttttctcttttggaatagtttcaataggattggtaccaattcttctttgaacgtctggtagaattcagctatgaggtcctggacttttttttttggcaattttttaattaccatttcaatctcactgcttgttattggtcggtttagagtttctgtatcttcttggtttaatctaggagggctgtatatttccaggaacttatccatctcctttaggttttctagtttgtgcatgtaaaggtgttcataatagctttgcatattcttttgcatttctgtgatatcggttgtaatatctcccattttgtttctaatagagcttacttgagtcttctttcttcttgattactcttgctaattgtctatcaattttatttatcttttcaaaggacctgctttttgtttcatttatcttttgcatttttttgtttcaatttcatttagttccgccctgatctttctttgttttttttttttttcttctgctgggtttgggtttggtttgttcttgttcctttagttttttgaggtgtgaccttagattgtctatttgtgctcttccagactttttgatgtaggcatttcacactatgagcttttctcttagcaccgcttttgctatatcccagaggttttgatagattgtgtcactattatagttcagttcaaagaatttttaaatttccatcttgatttcattgttgacccaacaatcatttaggagcagattatttaatttccatgtatttgcattgttttgagggctccttttgtagttgatttccaattatattccactgtggtctgagagagtactttgatataatttagatttttaaaaatttactgagacttgttttgtggcctatcatatggtctatcttggagaatgttccatgtgctgatgaatagaatgtatattcttcagtggttgggtagaatgttctgtaaatatctgttatgcccatttgttgtagggtatagtttaagtccattgtttctttgttgactttctgtctggatgacctgtctagcactgtcagtggagtattaacgcccccactattattgtgttgtcatctgtctcatttttttaggtctagcagtacttgttttataaatttgggaactccagtgttaggtgcatatatatttagaattgtgatattttcctgttggattagtctgtttaccattatataatgtccccccttgtctcttttaactgctgttgctttaaatattgttttgtctgaaataagaaatagctattcctgcttgcttttggtgtccatttgcatggactatctttttccactcctttaccttaagtttatgtgagttgtcatgtgttaggcgagtctcctgaagacagcaggaacttggttggtgaattctcatccattctgctattctgtatcttttaactggagggagcatttaggccagttacattcaacattagtattgagatatgtggtgctattctacccattatgctatttgttgcctgaataccttgttttgttttgttttgttttgttttgttttttcattatgttattttattacaggccctgtgagattcatgctttaaggagattctattttggtgtatttcaatgttttgtttcaagatttagaattccttttagcagttcttgtagtgctggcttggtagtgatgaattctctcagcatttgtttgtctgaaaaagactgtatctttccttcatttatgaagctcagtttcactggatacaaaatttttagctaattgttttgtttaaggaggccaaagataggacccccatcccttctagcttgcaggtttctgctgagaaaactgctgttaatctgatagatttttctttataggttacctgatgcttttgcctcacagattttaagattctttcctttgtcttgacttcagataacctaatgactatgtgcctgggtgatgatctttttgtgataaatttcccaggtgttctttgagcttcttttatttggatgtctagatctctatcaaggccagagaagttttcttcatttattccctcaaataagttttcccaacttttagatttctcttcctcctagggaacactaattattcttaggtttggtatttaacataatcccaaacttgttggaggcttcattttctttgattcttttttctttgtctttgtcacattgggttaattcaaaagccttgtcttgaagctctgaagctctttcttctacttattcaattctattatcgagactttctagtatatttcatatttctctaagtgtgtctttcatttccagaagtcgtgattgttttttatttatgctatcaatttctctggagagtttttcattcatattctttactaactgctataatattgccttgtttaaatgtacactgaattatttgtatttttcccctgtagttggacattaagttgtttccaatgttttacaactataaaccatactgatgtattttgtttctaatattttagtgatgactctttttttttttttttttgagacggagtctcgctctgtcgcccaggctggagtgcagtggcgcaatctcggctcactgcaagctccgcctcccgggttcacgccattctcctgcctcagcctcccaagtagctgggactacaggcgcccgccactacgcccggctaattttttgtatttttagtagagacggggtttcaccgttttagccgggatggtctcgatctcctgacctcgtgatccgcccgcctcggcctcccaaagtgctgggattacaggcgtgagccactgcgcccggccttagtgatgactcttaaccagaaaatagacttatgcctaagtgatctatatctccttccctctcctgaacaagcaagtacttgcaaaggcttccttgtgatcccaccctcatgacataaatgatgttgtgcttcgtaatttagttccaacctcttttaaccctcaaatttagccattgttgttctcattttataaactaatgctttcacagatatcccctcatgttctgtaacactttcttagatttatcttcatgttcagcaactttttttctccctatttattcttgcatttcatttctttcttctgatccacttctctttttcctggagtttatcctttagtaattatttcaatgaccatccactagagaagcatgaagcatgtaaaactacacagtttcctgagtcactttccagagtcttacccatgctgtcttttcaaactttattccttgtccctaggagttcatgagatttccttttcttctacttaataaaactcaagttgaattgagttagtgcctgttctgtgaagccagtgtcctttctagagaaaatggcatatatatatcacaacttttttactgcatgtgacaacaaaacctgtcaaatatgctaataccaaataggaatgtgtggttccagaggactcatttgatccaagtcaagtaatgctcttcacttagttgtctattgtttcttatgtcaatttgctaagtgctggctttgttgatgggcaactatcaaatatagtgtttcaagataacttccaggtttaatgctaggagaaaaatgaagacaattttccagcaatcttcataaagtctccctgcatttcattagctatgatttcgtcacttactctttctgaactgattactgtagtcagagaataaaatactctaactgactggacctgatttccctgcccacctctggaggcaattccacggaattcacagtggattcaatttcactgggaattcatgagctaagagggggagagaaaatgacttcccagaaggaaaatgggatataggtttcaaaatgaattcatgcatagattagtgaagaaccaccaaaaggtgaagaaaaagcaaacacaacagacgtctctacctcctagaactctgctgggcactgtggagacagatgggcacccattatacaatccctacttcaaaacactcgataaaaacttgaaggaccagagtagcaaacactgttgttccccactccatatcttctacatccactgagttaactgcagctgcagcccatatctcccatcaagctgagaacttctctctttgattgtcttcttttctttttctcctgcttgagggttttcttcatcctcattgtacaggggttcctgaaaagtgagagggtgaatgccttcaggggcaactttcagacaacaggggacagaagttgatggataacactccagcctccctatcctccatccagttggctccacacagtatctcagaaagtccccagcagtgtgaagcctcagtttctcacaaagtaacccatttactaacacactctttcttggctttcctctcctgtttcactctccccctcgccctcacttgtgcttctgaagttatccccacctcacatagattttctgtaaccagtcccgtgttggtgtctgatgttgagagaaatcaaggtaagaataaagtatcctatgagaaaacactggagagtgatctcatgtaggatttgcttgtcatagcggggtggaagtgaatgctggctagcaaaagaaagaagaaagtacttagaatgactagaagtactagaaaaatgggaaaggggagagagagtgagtgtgcgtgtgtgtgtgagagattgatttagctgttagctgcatcttagtggctaagaaggaatattccagaaaggcagaatagcataaactggatgaatagcagcaggaatgtgtaatgctaggagtgagtgaagttactcagagattagcacatgtttgttgagggcatactgaatgtcaggccttgttctaagtgctagactgcagtggggagaagtcacaaaatcactccccttttatgtctgtattctaatatggcagaggggcaagagagagtgaacattgaattcaagaattaatcctacctgctacccacctcgactccagtgacttcctacctacttcttgtagaaagaacattggtagtgtggggactggcttgcaaatatggttgtcatccttgtctttgctggaccttgaagggcattaaaacaatccacttcctgggctagatggtcacttgtcaacagcctttaaaaatgtggacaaagaaatatacaacattttgtctgtagaattcttattaaaagcgtatactcttaaactaatcattaagaaacattaaacaaaacccaaatgagagatatttgacagctgtcttgtccaataccatagctactagctgcatgtagctattttaattaaaattaaataaaatttaaaattcagttccaagggtaaaaaaatttcaggtagacaggaagaattttttcgtagttctattgcacaacatagtaaatatagttaataatggagtattgcacatttcaaaattgctaataaattttaaatgttttcactatgaaaagtgttaagtatttgagatgatgggtgtattaattagcttgacttaattattctacattgtatttataaatcattacattactttgcattccataaatttataaaattataaattgtcaagattgtcaatttataataaaaaattaactaaataaaatttaaactgggtatagtggtccacacctctaatcccagcaactcaggaggcagaggcaggaggattgctggagcccaggagttcaagtccagcctgggcaacataccaagactcaacctctatgaataaataaataaataaataaataaataaataaaattaaattcctaagccccactagccacatttcaaatgcacttccatgtgatgaatggctgtcatattggtcagcacagatacacagcatttctgtcattgcagaaagttctacaggatggccctgatgtacagaatagcttttctaaacgtcaaggtcaggaaagactgagggactattccatagtaaagtagaccaatgtgacatgacgactgaatgcaatgtgagctcttgggttggatcctgaaacagaaaaaagacatcagtgggaaaaatagagaaatctgaataagacttggattagttaacaatactctattggtgttaattttatggttttgattattatactgtggttatataagatgtaaacatttgtattatttttgcaactgtgctgtaagtctgaatttatttcaaaattataaagaaaaataaaataagaaatcatctattggccccatctggctatttatattattttatcttttattatttattgcaccccaccatattttatgagtacaattcattgattagtccatttattagtggggcgagtcatccactccctgcttggcaatgaggactctattgctggagatgggcagagcactgaaagtccccatcacgacatgttgcagtggtacaattgtcaacattttattattagtgacctggaatgtgattcttgaacaaaatactcaagtaggtgcaagatgtcaggcatctgaaaagcacagaggaagtagtaattataactatggaattgaatgccacttgctaagtacaaatgatgcataggagaaattcagtgaaaggtcaagaatgattaatcatcagtttaaggcaaaatatgaaaatcagaggacctccttatcattgtgtaaagtaactctcatatcctgcagctggaagatgacaaaaatatgagaaccaggcctacgatgtaattaagaaggtagcagagcttcagagaaggtggtcaaattattagtcatcttgagatccttcagcacactggtccaccatattgatgatgtcatgctggttgggctaaattaacaagaattaacaggtgcactagagtcttggtaagagacatatgttccagagaatgggagtaaactctacaaagattcctacataagtaaaattttgggggaggtccagtggtgtggggcatgctagatatttcactccaagtattgtgcctcccacctttgaccactaggaaggaagtttcattcctggtaggactctttagattccagaggcagttatccaacacttggcatacttctctgacccgtttactaggtgacatggaatgctgtcaatttcaagtgggttccagtgggaaaggactattgatctagactgtggtgtaaataaccctgctgcttagcctacatgttccatcagaccctaaggcatttgaggaacttatgagggcaaaagacactatctggaccttggtaagccctaataagaataatcactttagacctagggttctggggcaaggctatgccatcttcagcggagaattatacacatggaagatggctccttgcatgttactgggcttggtagggaatagtacctaaccgttaggacatctctgtccatttctgtcaaatctaccaagttatcaggttgcgtgagcccggcagcaatccacgttaagatggaagccacacaacaagattgggtataagcattgacagaagcttaagtaagctggatgagaaagggactcatgccattcagcactattgcaccagttcctctcccgcagctcacacccatggctgggtgtgtatgcatgtgactcacatatgacccgaccagtggacagaggaggaaaatggtagggctggtggccctgaatgacagctatgagagtgaaatcctcccagtgaccacaaatttgggcagtgaccttgttgtctactttctgtggaaagagaagtgccccaacataatatgaatcttctgttacatacatacaattgtgtgatacacataattcatcaactatgggaatggattttctgcttgctgtggaatgtgggaggaggaggattggaagaccaaggacaagaaggtccgggtaaatgcatgttaatagacagataaagtaggcacaaagtaggaaactttttgttttggatagagagtgttctctatggaagaggcacaaaacaacaaagtgaacagaatgactcaatcagtgtaagtcggccagcctctgactttggccactccactgtcagcatggtgaacatgtgaacagagtagccaaggatggactcaacagcatggagtcccacatggcagctcattggaaggtgcccattgtacagcaaagagctgcagtagtgagtccatgcccttgagatccacgtgtcctatcacgtatcacttcacccagaggctaccagcctcctacaggcatctgaagatatagctgaagagtgagcttagaaatgatggcccccaagcatggggcatcatcttccaagatgtggtacatagcctcaatcaataatcatttgatggtgctgtgttcctcatgggcagaacacatgggttggaaaataagaggaggatataggagtggccccactttgccattactctggatgatccaattgggagattcgtgttttttgtcccaaccctcatttctgcagtttctgtgataatacttctaccaggagatagtcagagtaccattaaattttcagatgctgccgtcatatggtcacttctggctcctcgtgtcaaacagcaggcaaaaaaatgagtccccaccttggcaagaataaatgggtttgattatcacaggaggtagggctgctgtgacacaatgggaaaaatatatttggaattcaggtgatcctgttattgcaccctagaccgtgatttctttggctcttgtgtaagcagaaattaacaccaggcctaatggagatttgtctcaggcaaggtttaataggcttgtgcctccagcacacagaggaacagtgcatagggaagggatcctggtaccagctcattgaggggctcggttcttatcattttaaggaagttgaggcaggaaaaggaatgttaaggtggtggtctttcccacacttgtgtagtgggacatcatgctgtaacatatatcgcatgaccagaaaatgatgggtaagccccaccctgggcagatattttagtattataatgaaattataatgaggaaaaagtcagtgaaaggtcttcgctggagtctactttgccttcaggcagctggatctggtcaggtttttatcaggaatgccagagtcttgcttcagtgaccttagaaggcattactcaaagatataaatggttaggttcttccttttttgcttaggaattaggcctggtcagcgaaattaggagaggctcccttcctgctatgtgacttgggtcagcttgttaagggaggtaaaaaggtaggggaggaaatatgcctgaacatgtaaagcccatcagtacctaggttaccatgccatctgtgtgccaggacctagtctcttccttatgctgcctcaatcctttggagtgtctcttggtgtactctgcctatttgtgactgtgaatggcagagtacgacactgacctcagaaggactcatacccttcaaggacgagagtctagggcacgccaccaggtaaaccacctagaccatcagtgatgctcactgatggtgggaagagagtggacagggttgggaggtagaacaggtaatagaggagggagacaatatcacctgcttagcactaacctgcatcctgcatattttcctctagaaaatttacttccattactaggagatgcaggcattaaaaggctggccccttacctcattttgggacctttctgaaggcaccatccaagctccaggactcccctggggtcagccgagcaccgtgaagactgaatcggtatttaacttctccctctgcccatcactgcttcccttactctctggtggctttaagatctgtccgtacattcttttgtgctccttcccagtagagatgcagtttcatttctctcctcttgtgtgtgggctgaacttagtgactcattttagtgaatagattacggcaggcattgcaagatgtcacttcctagtggcttcggtcttggtgtactccctccctcactctgtcttgtcactcattctggggagagccagctgccatgtcacgtgaacactgttaagcggccagtgtggtgaagaactgagtgctgccaacaccatgccctgagttcaggagtggattgtcccttgactgacagtgtgactgcatcctcatgaggaacctagagccagaaccagacagctaagctgctcctggattcctgacccccagaaatggtggagataatgaatgcttattgctgcaagctgcagagttttgaggtaatttttcacatcacaataggtagctaatatattcccttacaactgctgtcctcaacaaaactctccaatgaacttcctgcctgaaaatcttcctctcagactctgtttcttgggaaatccatcctaagagagaaagcaaaagcatgtattaggtaaagggcttgctttttctgtggaatgctgtattgttgagtgtagaaagacaaacatatggccataaagtggtgtgaagggagaaagaaggttttctaaaccaggctaaggagatacaacttcacctttgccttgtaggcaagtgggagtctgtccagtgttttagggcagaaacggcattctagaagcagaatgaagaatggataaaatggagggactagctacagggagacaaaactggagtttactatgttctttggacaagaaataaaaatcatggactacctctaatccctggtaggtgggactaataaaatagagataataacagtacttactttatagaggagttgttagggccatatgagctaataactataaaagggcttagaacaatgcctggaatgtagactcactatgtaagtggtggttaaagaagtatgtgttaagtcagtggcacctccagggccagagaatttaccagtcaatgttgggacagccaagggttggagaggaatggaagaacatcccaagtagttcagttgggcagacaaaggagtgattcagcactcaaggaaacttctcattaagcgaatttatgttgagtccatggccatcattctgagttcaaggccttactctctctctcaaatgtgatttgtgctcttgataataagggtgactgtcaagagagggaataacctatcaccatgagagtgaaaataaactcaagcttgtgctctgctaacatcagatcagcaaatgcagtctcctgagaagggaggaagactgtaccctgccccggacaccctgtacttggctcacaaaatggatccattatgagagacttctaatgccttcagggcttctctgtgttttctctgtgaatgagagaatggacatttgatgctgtaatctgacaagttcctgctgcctcatcttataggccacaatagattactttcctgaaaggcaatttcccacttacacaagatctaaaaggctttccctgatatttcagctgctggctctagataatgggcccagttagacagagtggttattgaatatctatgtaattaagaaagtatcagatgtcgtgtggaataatgaggaggaaatttgtagccaagaagacaacatggcccagtgctgtatgaatactcactcagaaataagtctcttacccaaaataagggcagtgtcctgaaataaggctccttacctgttttttcccactggcctccagattcttgactttgcacataccaagattttatatgcagaaccacttaatggaagttctttaacttgggacttttggaagatgacaacagaatttttggagaactattgagctcaacattctgaaatggaaaggacacacaattgtttcagcttgggtgacctccctgaaggagatcctgagtcaagggcttttgaacagagggtttatctaggagaatgagtccaaaaaacaggaatagggcctgagaagagtactcatttccagcatcagtatagatacttccgcactgtgattttttatggctgcagccacagggatgtgtcacaattcatttaaccacttttcaattgtttggtacttagcttgttccattttttattatgtactcttgaaaacaatatctgaaacatccatgtgcattaatctctgcaaacatagctatttcccaagaataaattgtgacactgaagtgctgagtcaaaagcttttgatgcatattgccaatttttcctacagaaagttgtaccaatctacatattcaccagcagtgtatgagaatgcttgtttcttcataagccaggatattactattttaaaaaatctctgccagatagaaaataagatctcattttgtcacatttttctgaggtatagtaatgctgaacagttaaaatatatttattggtcatcagagttgctcttgttatgaattacctattcatatccattgttcttttttctagcaactgtgctacagtattttttaatatttatttgaacaaattatttatatattaagaatgctattcctttgcaaaaaatgtatgtgtatatacttcaccagcttgttgcttattttaaaatgttgtttataacttgatgtatgtaagtttacaaagcttatgatatgaaatctaacagattgggttggggggcagagcaacatggctgaataaaaggctccaaatggcaggagtaagtccttacttattaacaataacattgagtttatcaataataaaatttagtgtaaaaggactagactccccagtcaaaagatgtagagtggccaaatggataaagaacaagacccagttatctgttgcctgcaagaaacacccttcacctataaagacacaaatacactgaaaataaagggatggaaaaaatattccatgccaataaaaaccaaaaaagaacaggagtggctacactaatatgaaacaaaatagatttcaagacaaaaactataagaagagatgaagaagatattatataatggtaaggggattgatttagcaagaggatgtaacaattataaatatatatgtacccaacgcaggaacatccagatatataaagcaaatattatcagagctaaagagagagatagacccctatacaataattgctgagacttcaatacccaactttcagcattggacagatcttccagacagaatatcaacaaagaaacatcagagttaatctgcaatatagaccaaatggacctaatagatatttatacaacattttgccaaacatcttcagaatacatattcttctccttagcaaatggatcattttcgaggatagactctctgttaggtcacaaaacaagtcataaaacattaaaaaaaatttaatataatcaggcatcttctctgatcacaatggaataaaactagaaatcaataccaacagtaattttgaagactacacaaacacttgaaattaaacaacatgttcctgaatgaccaggggtcaaatgaagaaattaaaaagaaaattgaaaaatttattgaaacaaatgataatggaaacatgacaaaccaaaacctgtgggctacagcaaaagcagtactaagagggaaatttatagctagaagtgcctacatcaaaaaagaagaaaaacttcaaataaacaacctaaaaatgcatcttaaagaactagaaaagcaagagcaaaccaaacccaaaattagtagaagaaaagaaataatgaagatcagaacataaataaatgaaatggaaatgaaggaaacaacacaaaagatcaatgaaacaaaaagttgttttttgggtttttttttaattgtttgggcatctgaattggaaaataagaagtcaaattacccttgtttccagatgacataatcttatattaaaaaaaaaaaagattccacaaaaacctatgaaaactgataaacaaattgagtgaagttgcaaggtaaaaaatcaacatacaaaaattagcgtcatttttatataccaacagtgaacaatctgaaaaataaatcaagaaagaaattcatttacaataggcacaaataaaaaatatctaagaattaaataaagaagcgaaagatctttacaatgaaaactataaaacattgatgcaagaaattgaagtggataccaaaaaatgtaaaaatatttcatgtttatggattggaagaatcaatctcataaaaatgtccatattacccaaagcaatctacagataaaatgcaattcctattaaaatgccaatgacattcttcacagaaatagaaaaaaatcataaaatttatgcgaaaccacagaagacccagaatagccagttatcctaagcaaaaacaactgtaggaatcacagagttctagtaaccaaaatggcttggtactagcataaagacagatacatagaccagtggagcaggattgagaacccagaaataaattcatatatgtatagtaaactcatttttgacagtggtgccaagaacatacattggggaaaggacagtcccttcaataaatggtactgcaaaaactggatatccatatgcagaagaatgaaactagacccgtgtctcttgccgtatacaaaaataaaatctaaatggattaaaaacttaaatctaagatctcaaactataaaactactaaaagaaaacactggagaaactctccaagacattggtctaggcaaagattttttgagtaatacccacaagcacaggcgatctaagcaaaaatagacaaatggaatcacatcaagtcaaaaaacttctgcacagcaaaggatacaatgaagttaagaggcaatccatagaatgggaaaaaaaaaatttgcaaaatacccatctgactggggattaataaccagaatatttaaggagccctaacaactctataggaaaaaatctaattatctgatttaaaaattggcaaaagatttgaatagacatttctcaaaagaagacatacaaatggcaaacaggtatatgaaaaagtgctcaacataattgattatcagagaaatgcaaattgaagctacaatgagatatcatcttaccccagttaatatggcttttacccaaaagacagagactaataaatgctggcagggatgtggagaaaagggaacccttgtatactgttagtggggatgtaagttggtacaaccactatggagaacagtttgaaggttcctcacagaactaaaaatagagctaccatatgatccagcaatcccactcctacgaattttgggtatatactcctaggtatatatacccaaaagaaaggaaatcagcatatcaaagagatatctggagtcccatgtttattgcagcactattcactatagccaagatttgaaagcaaccccagtgtccatcaacagttgaatggataaagaaaatgtggtacataatcacaatggagtaccggtcagccataaaaagaatgagatcccttcatttgcaacaacccagatgaaactggagttgttatgttaagtgaaataagccaggtatggaaagacaaacttcacatgttctcacttatttgttggagctaaaaatggaaacaattacactcatggagacagacagtagaaggatggttatgaggctggacagggtagtatggggttgggaggaagtggagttggctaatgggtacaaaaactagttataaagaatgaataagatctattatttgctagcacaacaaggtgaatatagtaaaaaataatttaattttacatctaaaaataactaaaagagtataattggattgtttgtaacacaaaggataaatgcttgagttgatggatacccatttatcctgatgtaattattactcattgcatgcctctatcaaaatatctcatattacccataaatacatacacctactatgtacttaccaaaactaaaaatttaagaaaagacctcaaggaaaataaataaaatttatcagattaaaaatgttatacttttctattataatatgtaaatactcaccttatattcaaaatacttgctttccttcataaatagatgttattattttctgagcccactttcctttctccactgatctgaaacgttatttttattataaattcaatacaaacatttcagtctataaaataaccacaaaataagaaatatgaacattttgaaaatgttttttaaaaaacttcatataactccatgaagatagatgtgtaaatattattgaaatggacaattttattagtcagggttcttcagagagacacaagcaataggagatagagatagagagagaaagagcgacagcaagagagagagagggaggatttcatatggaacttggctcatgtgattatggaggcttagaagtttcacgataggctgtctgcaagctggagaaccagggaaaccggtagtgtggctcagtctgagtctgaaggcttgagaaccaggggagacaacagtatgattctcagtcctgggggagcttctggcacaagtcttagagtctgaagttctggacccggagtcctgatgtctaagggtgggagaaaacgagtgtcatagctttaagggagaaacagcaaatttgcctttccccacctagactatctatctgtgcctcagctgatagatagttcccacccacgttgggtgagggtggatcatccttactcagtccactaactcaaatgccagtcttttccagaaacacccttgcggacatacccagaaataatgctttaccagctatcagggtattccttaatttagtcaaattgacacttaaaattaaccatcacaacaatgttccatgagagcatgaacttccaaagttaattcagatagaaaatctgaacagaccaataaccatttaagaatttttaaaagttatcgaatgatcatctgtttaataacaaactattaggaatcacaaactataatttttttggaacttaacacaaatttatttggttttcatgtaatggggtgtgtgtgtactttagtttctttttcaaaattttattttattttattttatttgaagttctggggtacatgtgcaggaagtgcaggtttgctacataggtagacatgtgccctggtggtttgctgcacctagaaacctatcacctaggtattaagcccagcatgcatcagttatttatcctgatgccctcccaccccctgcctcctgacagaccccagtgagtgttgttcccctccctgtgtccatgtgttctcatttttcagctccccattataagtgagaacatgtggtgtttggttttctgttcctgccttaggttgctgaacataacagcttacagctccatccatgtccctgcaaaggacatgatctcattgtttttttaatggctgcatagtattccatggtgtatatgtaccacattttctttatgcagtctatcattgatggacatttgtgttgattccatgtgtttgctattgtgaatagtgctgcaatcaacatacatgtgcatgtatctttataaaagaataatttatattcctttgggtatatacccagtaataggattcctgggccaaatggtatttctggttctagacctttgaggaattgccaaactgccttccacaatggttaaactaattaacattcccaccaacagtgtaaaagcatgcctatttctccacagcctcgccagcaactgttgtttcttgactttttaataatcacgatctgactgtcatgagagtgtggttttgatttgcatttctctaatgatccgtgatgttgagcttttttcatatgcttgttggatgcatatatgtcttcttttgagaagtgtctgttcatattacttggcccagtttttgatggggttctttgcttttttcttgtacatttttttaagttccttgtagattctggatgttaggcctttctcagatggatagactgcaaaaattttctcctattctgtaggttgtcagttcactctgatgatatttccttttgctgcgcagaagttctttagttcagttagatcccatttgtcaattttggcttttgttgcaatggcttttgatgtttttgtcatgaaatctttgcccgtgcctatgtcctgaatggtattgcctagattttcttctagggtttttatagttttgggttttacatttaagtctttactccaccttgagttaatttttctataatgtataaggaaggagtctagtttcaattttctgcatatagctagccagttttctcagcaccatttattaaataggggatcctttctccattgcttgtttttgtcaggtttgttaaaaatcagatgattgtagatttgttgtattatttctgagatatctattctgttccattggtatgtctctgttttggtaccagtaccatgctattttggttactatagccttgcagtatagcttgaagtcaagtagtgtgatgtctccagctatgttctttttgcttaggcttctattggctatacaggctcttttttggtgccatatgaattttaaagtttttttttctaatactgtaaacaatgtcaatggtagtttaagggaaatggcattgaatctataaattactttgggcagtatggccattttcactatattgattcttcctatccacgagcatggaatgtttttccattttttgggtcctctcttatttccttgagcagtggtttgtagttctccttgaagaggtccttcattatcctgttagctgtatttctaggtattttattctctttgtagcaattgtgaatttgaattcattcatgatttggctctctgctttgtctattgttggtgtataggaaagcttttgatttgtgcacattgattttgtatcctgagactttgttgaagtttcttatcagcttaaggaacttttgggctgagacgaataggattttctagatacaggatcatgtcatctgcaaacagaaatgacaaactataacattttgatgctagtacaagattgaaaagatagaatataaggactggaaagaatattcaaggtaagctatagacaatgtattatttatttatttatttatttatttatttatttatttatttattttgagatggagttttgctcttgttgcccaggttggagtgcaatggcactatctcagctcaccgtgacctccacttcccaagttcaagcgattctcctgcctcagcctctggagtagctgggattatagtcatgacccactgcgcctggctaattttttgtatttttagtaaagacggggtttctccacgttggtcaggctagtctcaaactcacgacctcaggtgatccgcccacctcagcctcccaaagtgctgggattacaggcgtgagccacttcgcccggcctagacaatgcgtttgactccaagagagcctcaagccactacaagaatgccaagtaaccactgaattctgtcagccttagagctagggtcttcttgtttctatagatggcacagcaacagcaaacacaaatctacctgcagaggaggaatcctgcgttttcctattgtatatacagagatctctagaagaacccacaaggagctggtaacagtggttacctctggggaggcaaccaggtgactgggcaaaggggtgtgagagagacttaattttcaccttacatgcttctgctttttaaattctgaaccatgtatctatattatccatccacaaataaaataaaataaaataaaatatacccccagtgaaagaaaataaattttaaaccacaggcaataagaactaacatacacacacactcacatacacacatataaatatatacagacagtccctgatttaagatggttcaatttacaattttctaatgttatgattggtacccatataactattctgttttgactttcagtacagtattcactaacttacatgagacgttcaatactttattataaaataagctttgtgttagatgattttgcccaacagtaggctaatgtaaatgttctgagcttgcttaaggtaagctagactaagctatgatattcggtatattaggtgtattaactgcacttttgacttaaagtattttcaatttgtgacaggtttatcagaagtaaccccagtgtacgttgaggagcatctgtatttggtgtactgaatataatatgtattgaaatatacactatgtatccaacacagtagataattaaaagtctatttataggcaaatgattaaaaaaattggtgttgagactcaatgaaatattatgcaacagtgacaataaatggggtagatacacttgtacacagaaaaatcaccacacctgcagttaagggagctatgaagattgtctagcaatatattatcataaatgacaagcaattcttcacacaaaacaaagctatgcctagctatatacagttgtacatgtgtaaatggggtccagaagttctggaaagattcacatcaaaataatagcagttacctttacagagggtattaggattaagatgagctttgattatgcattttgagaatatatatccatgtcttacttatattatagaaataaataaatgtttaaaaaataataaatctttgcatttgtgtttaaaaattttgttcaacaaatgttcatttgttgttgttcatggtataagtattggagacaacttaaaccgtcatcagtgaaagagtggctaaatagactatgccatatctgtgatatttaatcacatgccgctattaaagacaatgagggagatctcaccctgattacatgtatggttaaatgcattgaaattaaattgtcaacataccaaatataccaaaatattggcaatatttatcttcagaaagaagaataaaaatgaaggtataaattaggacttgatggtttttttttttttttgagacggaatctcgctctgccacccaggctggagtgcaatctcggctcactacaacctctgcctcccaggttcaagcgattctcctgcctgagcctcctgagtagctgggattacaggcacctgccaccatgcccggctaattttttgtatttttagtaaagacagggtttcactattttggccaggctggtctcaaactcctgaccttgtgatctgcctgccttggcttcccaaagtgctgggattacaggcgtgagccaccgcacccggccagtttgtttttaatatatatgagtgcctgtagtgtttgaaccttataagaacagtgtttttatttattattgtgtaattaaaaatctatattaacagaacataagatctgtagtagcagagtaacagtatatttgtgtcttgaaaatgaaaagacaacatttacattcatgattgatatggccgatccccccccattattcttcttagctgttgacatccattcaaactttctttcatttgattgatgcaactattttttgactctctcttctcatttttgagacagagtctcactctttcatccaggctggagtgcagtggagtgatctcagcttactacaacctctcctctcaggttcaaatgattctcctacctcagcctactgagtagctgggactacaggtgcccaccaccacactcagctaatttttggatttttagtggaggccgggtttcaccttcttggccaggctggtctcgaactcctgacctcaggtgatctaccttccttggcctcccaaagtgctgggattacaggcatgagccgctgcacccggtctgactctccctttcataaaccagaggatgacacctcctaatctctccaccttcctcttttagtcagtgtttcaaatggattaaaaacaagggctgcttgctaaggactacgctgatcaaaagaaatacagacgttgctctatgtgtcaaataaagcacctgtttgttcactttccaggaaaaattgccatgtggttgatactgtaggaaacaggagactgctatatttgttggagttggatgcagaccattcttacattgccaagtgtaggggcaaagggggtgtctagtctcatgttattttcaaaccttaaaagacatagagagtgaggcagttcttccaaatcattttaccaaagtaagttctcatttgttctgcattgacaacttcacatgattaaaagaaaggaaatttccccaatattccacttgtcacttctgatagcccgattctctacacagctaactcacaagtttacctgggaagccaagttctttactgactttgcagctttgaatattccagtaaaagatgtagggtagtactgcaaatagccctaaatctgctatttaaactttgaaacattttattcaagaccttgtttttcctactgaatttcccttgaagcttaaaccccattccctgtagtgcaaaatttccattaacaacgagaaccaacggcttaaatcactggatctgagttactttcttgttcctgagcatgaagaatgctttgaatactgctaaagggcacatgaatattttcaatatccttgggtaacatttgaagaaatacttgtacataggatacagtagtatctcatgtaattaagatgcaggtgaagtggcttaatgaggaagtagttcaatttgtatttgtggggagtttgtctcagactgcctgcccagatttttagtagaactgaactggcaaatagaagcacaaaacagatctccaattttagtagctgatagggtttggctgtgtccccacccaaatctcatcttgaattcccacgttttatgggagggacctggtgggaattgaatcatgggggcaggtctttcccatgctgtacttgtgatagtaaataagtctcacaagatctgatggttttatataggggagtttccctgcacaagcttctcttctctcctcttctctgctgccatgtgacaaatgccttttaccttctgccatgattgtgaggcctccccagccacgtggaaatgagagagcattaaacctttttcttttgtaaattgctgagtctcagatatatctttatcagccacgtgaaaacagactaatacagtacttatattaaaatgtccatgtgtcacacttttgacagttggctgcagtcaatgtcagctggaaggtgcacacacacacatatgcacatgcacactcacaccatacatttatagatacataattttaaccctacatgatttttcctcataaaaccttgcagaaagtggtcacttatatttagcattttttaagttataaaagtgattcatgttcagcaaagaaaatttataaaaatcagaaaaatacaaatgaggaaattcaaaatcatggattatcttactatccagagataactacaatttaataaatgcagagatcaaaagcaagatataaaactatatataatgatttcaattaagtaatatgcatcttgcttttcttatcttgaaagttatagcattaacatttctctatgtaatttaaaaatttagaaaaccaacctgtcagttaagggctgaaaggtgctttattgtaattctatggttttattaaacaaatcattttcttatcaccaggtatttaagttgttgccaatttttttctacattgtacacaatcctatgattaacatattttctgtcaatcttcactgcacctctgataattttattactgtatgtccttagaaaaaagattattgggtcagagaatatgccatgtttttatatttttaaaaatgcgtgttttcaggagtctttgaaaactggcatgtagcaggtgctcagaaaatatttgttaaatgggtatgcatattttaaagctccgattcatagttccaaattgctgtccagacaaaccatactcacttacgcttccatcaatacaaaaaaaaagtttcatggcacattaatcaatatctgtattgcaatttacatttttttttttttgagatggagtcttgctctgctgcctgggctggagtgcagtggcatgatctcagctcattgcaacctccacctcctgggttcaagcaattctcctgcctcagcctcctgactagcttggattacaggtacctgccaccaggcctagctaatttttttattttttgtatttttagtagagacaggtttttgccatttggccaggctggtctccaactcctgatctcaggtgatccaccctccttcatccaatgaagaaaaaaaagttcactggacttacagttccacatggctggggaggcctcacaatcatggtggaaggcaaggaaaagcaagtcacatcttacatggatggcagcaggcaaaaaaaagaaagctcgtgcagggaaactcccatttttaagaccatcagatctcgtgagactcattcactatcatgaaaacagtggaggaaagacctgcccccataattcaatcacctcccactgggtgcctcccatgacacatgggaattgtgggagttacaattcaagatgagatttgggtagggacacaaccaaaccatgtcaatatctctctctatatattctttattaatccttggtctatacttttttgtaatattttcccaagttgtcatttgcttttaatttcttttaattttagttttgaaatgaatagaattaaaattttaaaatttaaacaaatctagcagattttttaaaatctcttgctttgcttttggactaaaaaagacagctcttacccaaaaattgatgaaatgttttcctctagaataattagtggtttattttattttatccatctggaatctaatttgtgtaaggtatggcatgatattttcttttccaagcaaccaacttctaaacaccagttttgaatcatctatctttttctgttgttttgatgatgatttctttattgtgcaccagattcttacacattttaggacccgttttagggcttgaactttgctgccatgggactcaaataggtgtcacacttcttaatttttaaaatatttacaataccaagtagaaaattttcattatacttttttttttttttgaaatggggttttggtatgttttccaggctagccttaaattcctgggcttaagcaatcctcctgcctcagcttcaggaatatttcattatacattttttagaaatgagcaggtattttatcctagtgtgtggcatgaagagttgcacagtgcaaagtgaacagatgactcaaacaactacaccccaggtctgttgtcaagtgactaggtggcccctgagaagcctcgaaatccctgtggccccagttttctcatttattaaatgcacataattatactgaccttctggttggtggacttaatttaggttatgttagagagtccagcatagggcattcttagctttaagtgcccagtaaatatttgctgttaacattaatgttttaattgtcatttctttatctatgtaattgaggaatttggcattatattaatcagtattaatcagggttctccagagaaacagaaccaataggatcaataggatgtctaaatagacatagtgagagaaaaagatatttcgtttaaggaattggctcgtgacactgtggtggctgacatgtccaaaatgtacagagaagttcagtaggctggaaactcagggaagagttgaggttgcagctcaaatttaaggcagtctgaaagcagaattcctttctgctcaggagaactcaatgttttgttttaaagccttcacctgattggatgaggcccacccacatcatgaagggtactctgcttaaaactctactgatttgttaatgacttctaaagaataccttcacagaaacatcaagactgctctttcagcaaaaactgagtaccatggcctacccaagttgacacatgaaattaaccatcacaggcatattgccttttaggtaagtttagctttaaaattcagtggttccatgaattttaaagtactacttgtatattaggtatattcataatcttaaattctttctttcatttgatctctttgtttcagtaccttctcactacagttccttctttatcctacacttttgggattatccaattttattttgcaaaggcaacatctcatttgaattctgacttcttttctcccaacagtgttttgtatctgaaggtgtctaacatttctgtatgaaaagctttgtataacaagcataatttgggggacagatttgagttgctttgcaagaaacacttcttccttagctttctcaggacaaactccgatattaggaggggtctccctctgagggaaatgtgtcaagtggcatgttcattgcattatataaggctgccttcctgacagttcagaatgcttgagagtggaataggatgtggcaacttgcctcctgtttatcaaagtaaactaaatactttcctgaattcttgagaccctcttcccaggacatcctgtacacaataatattccactcttctcaattcaaatcaattaaactgacttaaggctcgctattcacagcttcctacatcgaattcaagatgtaatagtgaatgctaaaagtcctgctttccaaaagtgtaggggaagagacaggcagccacatgaacaacttaaataatatcgcatttagaaactctgatagaaaaattaatgcaatgctaggggagtagggaggatggaggattccttgcaattattggggcaagaattagaaaataattcatgaaagaggtgatgtttcagccaggtgatgaactgagaggacatgacatgttaagagaatatgaagaagattagagaagctctacagtggtatttaagtctttaattcattttgagttgatttttgtgtatggtgagagataggagctcaatttcattcttctgcaaatggcaattcaattttcccaagcaccatttattgaagggggtgttctttccccaatgtaacttcttgtcagctttgtcaaatatcagttggctgtaaatatgtggatttatttatagttctctattctgttcattggtctatatatctatttttattccaataccatgctgttttggttactcaggttacttgttaaatattttgaagtcagattatgtgatgccacaaactttgttcttttttgctcaggattgctttggttattcaggctgtttttggttccatataaattttagtagtttttaaaaaaattctataaggaatttgatagcgatttccttgactctctagattgcttaggtagtgtggtcattttaatgatattgattcttctgaaccttgagcatagaatgtttttccatttgtttgtgtcctcttcaacttctttcatcagcgttctgtagtttttgctgtagagatctttcatttccttagttaaatttattcctacgtattttatatttttgtagctgttgtaaatgggattgccttcttgatttctttgttggctagatcattattggtgtatagaaatgctactgagttttgtaaattgattttttatcctgaaactttactgaatttatttatcaaatctaagagtgttttggtggagtctttcgggttttccaggtataagactacatcatcaccaaagagggacaatttgtcttcctcttttctaatttggatgtattttatttctctctcttaactgtgctttggcggggacttccagtactatgataaataggagtggagtaagtaggcattctcgtcttgtttcagttcttagagaaagggctttcaacttcatcccatttagtataatattagttgtggattcgttgtatatggcctttattattttgagatatgtttctcgtatgcccagttttttgagggttttttttgtcatgaagagatattgaattttatcaaatgctttttctgtgtctattgtgatgatttttgtccttcattctgtctatgtgatgtgtcatgtttattgatttgcatatgttgagctatccttgcatccctggtataaatcccactttatcatggtatattatctttttgatgtgctgttgcatttactttgctagcgtttgggcagaattttacatctgtgttcataaagaatattagcctgtagtttttctttctttttttttttattttttccttgtctggttttggtattagggtgatgctggcctcatagaatgagttagggaaaattctcttctcctttattttttcaaatagtttcaagaaggttggtattagttcttctttgtatatttggtagaattcagctgagaatccatctggtcctgggcatttctttcttgggagacattttattactgattcagtctcaccactcattattcatctgttgaagttttctagttttttatgattcaatcttgatatgttttctgtttccagaaattgattcatttcctctaagttttccagttgttagcatataggtgttcataatagtcagatgattttttgcatttctgtggtatcagttgtagtgttctcctttttaatttctgattttatttgggatttcttcttttcttggttactccagctagtgatttaccaattttattatctttttgatgagccaacttttcactttttaaaatcctttgtattgtttttgtagtctctatttcacatggttctcctctgatctttattatctcttttcttctgctaatttggggcttggtttgttcttgctcttctagtttcttgaggtgcattgttagattactaatttgtaatctttctactttttttgatgtaggttttcattgctctagcttccttctttgtattgtttttactgtattccacaggttttgttacattgtgtttccattttcatgtttcaagacattattccattttaatttcttcatttacccagtaaacattcggaagcattctgtttaatttctgtgtatttgtatagtttacaaagttcctcttgttattgatgtctagctttattccactgtggaaaattcttgatacgattttaatttttaaaaatttaagacttgttttgtggcctaacatatggtctatactggagaacattccatgtgcttatacaaataatgtatgttctgcagttgttggatagaattttctgtaaatgtctgttagtgccatgagttctaaaatccagtttaattccaaagtccccctctattattatattgcagtttaactctctagatctagtttaactcttctctttataaatctgtgtgattcagtgttgggtgcatatgtattcagaattgttatttttttggctggtttgatatttttatcattatataatcttcattgtcttttttttgactaaaagtatctttcatctgatataactgctcttgctcacttttggtttctgttcatatgtaatatctctttccacctctttaccttgcatctgtatgtgtctttatatgtaaggtgagtatcttgtgagagcatataattgaattatgttttttaacccatatgccagtctatatattttaagtgaataatttaatccatttatgttcaaggctattgatatgtgaagctttattcttgtcatattgtttactgttttctggttgttttacatattctttattcctttctttttctcatattgtttataattgtgatctggtggatttctgtagtggtaccacttgagtcctttctctttcttctttttgtgatcattttaccagtgaatttatacttgtgtattttttttatgatggtaaatgttatcctttcacttccaggtttaggactcccttgagcatttctcatattgctggtctagtggtgatgaattccctcagcaattgcttttctggaaaagacttgatttcttctttatttatgaatgttatgaataataattttgctggataaatagtattcttcattgatagtttatatctttcagcactttgaatatatcatcccattagcttctggtctgtaaagtttctcctaagaaattcactgttagtctgatgaggtttcctttacacataactaggcacttctctcttgctgtttcaataatttgctctttatcttcgattttagattatctgattctaatgtgccatggagaagacctttttacatactctcactggggaccattgagccttctgtatctggatgcttaaatctctttctagagttgggaagtttttacctattattttgttgaataaattttctaatcttttcatttttacttcaccctctgggatactgataattcaaatatttgatcatttatgttgtcacaaatgtcacaacgggtttgctcatccttttttaaaaaaatttttgtgtgattgagttatttcaaagaactgtcaagttctgagattatttattctgcctgatgtgatctatttatgaaggttgcacaagtattttgtgtttccttcaatgaattacctaattccaaaatttctattttgttatttttaaaaatatctctctggcaattttctgattcataacctgacttatttttttaaaatttctttatattgtggttcagaattattttgtatctcactgagcttctttaaaatcaatattttaacctaggcaacatggcaaaaccctgtctctacaaaaataacaaaaattggctgaccatggtggtacatgcctttagtcccagctacttgggaggttgcagtgggaaaatcacttgagcccaggaggtcgaggctgcagcgagcagagattgtatcactgcactccatcctgggtgacagagtgagaccctgtctcaaaaaattttttaaattaaaaataataaaatcaatattttgaattctttatctggaattccaaagattatttttttaaatttctcttcacaaatgttgaagagatttcttttttaagatcttttgcttgagaattattgtgtttctttggagttatcatatttccttgtttttcatgtttcctatatccttatagtaatatttgtgcatctgatataacagtcactttttttctatttttgaatttacttttcacgtaggggaggacgttttccagatttttttttttttttagacagagtcttgctctgtcacccaggctggaatgcagcagcatgatcttggctcattgcatcctctgcctctgaggttcaagcaattcttgtgtctcagcctcccaagtagctaggattacaggtgtgtgccaccatgaccagctaattttttttttttttttgtatttttagtagagatggagttttgccatgttgtccaggctggtcttgaacatctgacctcaagtgatccacccaccttggcctcccaacgtgcaggtattacagatatgagccaccatgcctggccttcctgaaaatgtatctgtggtgttggttgggtagggtaatttggcttcaattctgggtgcatgcagtagtgtagtctctgtatggtttctttgcctataaacagtattagtgctttctctgatttcctcagagggttagtgtgtggttattagtggaagctgtggtgaagttgtgctacagactgggaagacaggtgggccagtcttcaggtcccagtcatgttagtagtgaactgagcatgtctgtctttgtgccctagggcagtgtatgctggtatccatgttagtgtttattggcaggccaattattgggcctccaagtggcttgcttggatgctggtagaagcagcaatagatcagaatggtgatcaggatctcaggtccctgagcagttggtgtggtgtgggaaacagcaacagcagtggtgggacatccctttgggttctgagtggtgcaagctagtggtggtgatgatcattgtgcaaggtcacctccaacaaacccagatctgctgctctgaggccctctctgcagcagtagcacccaagtaccgcagatgatgggggaagggcccctgcttctagtgtgatcttgggcatggaaattacactgccagcacagtcgtagttgccactccctgccccagacaggtagccctctggctcactggctccagtctctgtcagcagtaggaataggtatgcaaagagggaggaagggttctgttctctacatgagagctccagcacagaggccactctgccagtgggaggggatttcactcttggcttgcagagctgagcacagagattgagccactgcttgggggcagagtcagagccctagggtcatgggctctggaaagtacacactttgctttcctttgtcctggagtcggggaggggatgccttctggtgcactgcacaccctattccccaagatgtagtacttcctatgagctaaagtactggggactctgcagcacctttgggaccagccaatgctgttctgccaaagccctctgtgtggacactggggaatgtcatcaggagctcctgagatgtggagatatgagggctgttgttcccagcgcaggatgcagtaccatgatgctgtgctaccaaaaggctctgtacagcagctgttcaggtcttggagaggtaagtgacccagcgtgagttccctgcctagtgcaatgccctcatggggtctccaaatcactcctcacactagtatcagggtttgtatgggtagagagctctctagtggtttggattgcagcaggccacagcaggaaggtggaacactgaagctttttcatttatcttttccccataatactgagtcccttggggcacccaccagtcttggctaagctggctgcttgctcccttttccttctgtgcctcagatgtttcccatcagttctccattggactctagtgttctctctaaggtgttctgttcaaagaatgaatgtctattcataattttgcttcattttttctggagagagtgggtgtctgatatctttaggcagccatcttgaacaaggatctatatacagtgtttctgagtttatctttgtgtgtgtgtgtgtatatatatatatatatatatattttttagtggttgctctaggtattatattatacatacctatttctcacattctactggtgttatcattgtatcagttctagtgaagtatacaaaccttaccactttttatattattttgccttttcccaatttataatataatcattgaaatatttcctttacctacatttaggactacactagacagttttataatttttgcttcaactgtccactataatttagaggttacaagagataaaaactcttgtatttactaatatttttgcttaccatgttatttcttctattattgttttatttccatttgaaaacattattgagccattctttcaagataggcttgcttctgacaaattatcttagttttctttatttgagactgtcttgatttgtccttcatttccaaaggaaatataggaaatacatatacatatataaaattttgagacggagtttcgctcttgtggcccaggctggagtgcaatggtgctatcttgcctcctgcaaccttcgcctcctgggttcaagtgattctcctgcctcagcctcccaagtagctgggattataggtgtgcaccaccaccatgcctggctaattttgtatttttagtaaagacagggttttaccatgttggtaaggctggtcttgaactcctgacctcaggtgatccacccgcctcagccttcgaaagtgctgggattacaggagtgagccaccgtgcccggctccaaaggacatttttactggatacaggattctgtgttgacagttcttttccctaagcacttaaaaaatgtattacttttggcctttacggtttcgaataagaaatatgctgtcaatcaaattgtttttcccttatagataagttttcctttttctcccactgctttcagaagtctatgatgtttcttgatgtggacttctttgaatttatctatttgagtttcacctgtcctcttgtctttttctaattatggaaagttttcagacatttgtttcttcaggtactttttcaggcctgctttctttcttttatccttctggaactctgatgacatgaatgttatatcatttttatagtttcacaaatccctgtggatatgtcaaaacattttagtctgttttctttctgttgtttataagagtaatttatattattctatctttcaacttacttgttcttttctctggctcctacaatctgccattgagccaagccattgggttttcttttgatttcagttattctatcttttagttttaaaatatcaacttggttattctttgtatcttctgtttctttgctgagaatttatattggttattctttgtatcttctgtttctttgctgagaatttatattttttcatttgtttcaagtctgtgcgtaattgctcttcaaagtatttttatgttggtttctttaaaatctttgtcaaataagcctaacatgcctgtcaaatccatatcggcatacagtgattactttttttattcaatagaatgctctaggaagaaaatgctcaaggtgtgaccattagctaatgaggaaaggagtcactggaaaaatatcgctgtttcctcttcctcagctgtgcttcatgtagactctcagaacgtctccaatgagactgactctcattactcatagtggtaaactgctaattatttttcttttaattaactgttctcctttccttgtctcagtttcacagtttcttaccatgcttccagtgatcacctctcaaataaacaatgtatcttaaagtctatgtcttagatctgcttttattttttcagtggtggcatagatggaaggtgagggcagatgaaagcaaacaatgaaaatcctctatattctctttttaatacagacaaagtatatgcaatcaggataagaaacataatatttatatattgatctatgtagcattcccccacacatgtatttctatcttataatactttgtccacttccgattgaagtcatgttatctgtgatgtaacctactttgctttgagagtggctctgttttcactgtctagctaagcaaaatcagaattacatgtattttatattctcaattaaaatgaacataatgcaagggggccaaagtagccaactaaaagcagctacagtgcatggctctcagggagaggaatgaaaggggcaagtaaatacagcatcttcaactgtacatccagcaccttcaactgaaacatccaggtactcccattgggattaatcagagaaatagctcaacccacgaaaaaagggagaaaagcaggacagggtgaagtcccaaccatgagttacatggagccaaaggaacccatccaaaggtcaacaactacaaagattgaaggtagataagtcacaaagatgagaaagaaccagggcaagaacactaaaaactcaaaaagccagagtgtcctctttcctccaaatgaccacatcacctcttcagcaaggatttggaacggggctgaggctgagatggctgaaatgacagaaatataattcagaatgtggataaaaatgaactacactgagctaaagaaacatattataaccaatgcaaggagactaaaaaccatgatgaaacactgcaggagctgaccaaatagccagtatagagaaggacgtaagtgacctgatagagctgaaaaacacactacaagaatttcataatgcaatagcaagtattaatagcagaatagaccaagtgaagaaaagaatctcagagtttaaagactgtatttttaaaataagacaggcagacaagaatagagaaaaaagaatgaaaaagaatgaacaaaacctccaagaaatatgggattatgtataaagactgaatctatgactgattggtatacctgaaagagatggggagaatggaaccaatttggaaaacatatttcagggtattattcatgagaacatccccaatctagcaagacaggccaacattcacattcaagaaatgcagagaatcccagcaagatattccatgagaggatcatttacaagatacacaatcatcagattctccaaggttgaaatgaaagaaaaaatgttaagagccaccagagagaaaggccaggttacctacaaaaggaagcccatcagactaacagaagacctctcaacagaaaccctaccagccagaaacaataggtggccaatatttgacattcctaaagaaaaaaattacaatacagattttcatgtcttgctaaataaacttcataagtgaaggagaaataagatctttttcagaccaaatgctgagggaatttgttgccaccagacctgcctttcaagggctcttgaaggaggcaatatatatggaaagaaaaaaatgttaccagccactacaaaaacatactgaaatacaaagaccagtgacagtataaagcaaccacataaaccagtctgcaaaataactagctagcatcatgacaacaggatcaaatcaacccataacaacactaaccttaaatgtaaatgagctaaatgcctccaaataaaagacatagagtagtaagctggataaaaaaacaagacccattggtatgttgtcttcaagagacccatctcacatgcaatgacacatgtaggctcaaaataaagatggaggaaaatttaccaagcaaatggaaagcagaaaaaagcagggattgccatcctagtttctgacaaaatagactttaaaccaacaatgataaaaaaagacaaaggacatttaataatggtaaatggttcaattcaacaagaagaactaactatcctgaatatatatgcatccaacacaggagcacccagattcataaagtaagttcttggagacctacaaagagacttagactcccacacaataatagtgggaggcgttaacaccccactgacaatattagacaggtcactgagacagaaaattaacgaagatattcaggacctgaactcagctctgggtaaaatggatctgatagatatctacagaaatcttcacctcaaaccaacagaatatacatttttctcattgctacatagcacctactctaaaatcaatcatgtaattggaagtaaaatactcctcagcatatgcaaaagaactgaaaacataacagtctctcagaccacagcacgatcaaattagaactcaagactaagaaattcactcaaaaccatacaattacatgaaaattaataacatactcctgaatggcttttgggtaaataatgaaattaaggcaaaaaccaagaagttctttgaaactaatgagaacaaagatacaatgtaccagaatctctgtgacacagctaaggaagtgttaagatggcaatttatagcactaaatgcccacatcaaaaagttagaaagatctcaagttaacaacctaacatcacaactaaaagaaccagagaaccaagagcaaacaaatcccaaagctagcagaagacaagaaataaccaaaagcagagctgaactgaaggagatagagatgcaataactcttcaaaagatcaatgaattcaggagctgactttttggaaaagattaataaaatagacaaataacaaaagagaagattcaaataaatacaatcagaaatgatgacgggaacattaccactgaccccacagagatacaaacaaccatcacagaacattataaacacctatatgcgcataaattagaaaatctagaagaaatggacaaattcctggacacacacactctcccaagactgagccaggaagaaatggaatccctgaatagactaatagtgagttctgaaattgaggcagaaataaatagcctaccaatcaaaaaaagcctaggaccagacagattcacagctgaattctaccagctgtacaaagaagagctgataccattcctattgaaaccattccaaaaaattgaaaaggagggggactcctccttaactcattctatgaggccaacatcatcctaataccaaaatctgacagagatttaaaacaaaagagaacttcaggccactgcctgataaacatcgatacaaaaatcctcaataaaatactggcaaaccaaatctagcagcacatcaaaaagcttattcaccacgatgaagtagccttcatccccaggaagcaaggttggttcaacataaacaaatcaacaaatgtgattcatcacataaacagaactaaagacaaaaaccacatgattatttcaatagatatggagacaacttttgataaaatttaacatccattcatgctaaaaactctcaataaactaggtattgaaggtacatacctcaaaataataacagttacatgtgacaaacccatagccaacatcatactgaatgggcaatagctggaagaattccccttgaaaactagtacaagacaaggatggcctctctcaccactcctgttcaacacactattggaagttctggccagggcaataagaaaagagaaataaataaagggccttcaaataggaaaagaagccagactatccctgtttgcagattacatgatcttatatttagaaaacccccttgtcttatccccaaaacttcttaagctgataagcaacttcagtaaagtctcaggatacaaaatcaatatatgaaaatcactagcattcctacacactaacaacagtcaagccaagagtcaaatcatgaacgaactcccatttataattgccacaaaaagaataaaatacctaggactacagctaccaagggaggtgaaagatctctagaaaaacaactacaaaccactgctcaaagaaatcagagatgacacaaacaaatggaaaaacattccatgtccatggatagaaagaatcaatattgttaacatggccatactgcccaaagcaatttataaattcaatgctattcccattaaactaccattgacattcttcatagaattagagaaaaaactattttaaaatttatgtggaactgagaaagagcccagatagccaagacaatcctaagcaaaaaagaacaaagccggaggcatcaccctacccaacttcaaactatactacagggctacagtaaccaaaacagcatgatactggttaaagaacagacacatagaccaatggaacagaatagagttctcagaaataataccacacacatacaactatttgatcttcaacaaacctgacaaaaacaagcaatggggaaaggactccctattcagtacatggtgttggaagaatgggctagccatatgcagaaaattgaaactggaccctttccttacaccatataaaaaattacctcaagatgaattaatgacttaaattttaaacccaaaactatagaaaccctagaggaaaacctaggcaatatcattcaggacataggcatgggcaagtattttatgacaaagatgccaaaagcaattgcaacaaagcaaaaattgacaaatggtatctaattaaactaaagagcttctgcacagcaaaggaactatcaacagagtaagcacacaacctacagaatgggaggacatttttgcaaactatgcatctgacaaaggtctaatattcaggatctataaggaacttaaacacatttagaagaaaaaaacaacttcattaaaaggtgggcaaaggacatgaacagacacttctcaaaagaagatatacatgcggccaaaaatcatatgaaaggaagctaaacatcactgattattagagaaatgccagtcaaagccacaatgaaataccatctcacaccagtcagaatggttgttattaaaaaatcaaaaaagtccaggcatggtggctcacggctgtaatcccagcactttgagaggccgaggcaggtggattgcttgagctcagaagttcaagaccagcctgaccaacatgctgaaacaccatctctactaaaaatacaaaaattagccaggtgtggtggcaagcacctgtaaccccagctactccggaggctgaggcaggagaactgcttgaacccgggaggtggaggttgcagtgagccaagattgcgccattgcactccagcctgggcgacagagtgagactctgtctcaaaaaataaaaataaaaataaaaatataacagatgctggtgaggttgttggggaaaaaggaatacttatacactgttgttgggagtctgaattagttcaactattatgaaagacagtgtgacaatttctcatagacctaaaaacagaaataccattcagcccagcaatcccattcctgggaatatacccaaaggaatataaattgttctattacaaggacttatgcacatgtatgttcactgcagcactattcacaatagccaagacattgaatcaacctaaatgcccatcaatgatagactgaataaagaaaatgtggcacatatacaccatggaatactatgcagccacgagaaagaatgagatcatgtccttggcacagacatggatggagcttgaggccagtatccttagaaaactacctcaggaatacaaaaccaaatccctcatggtctcacttataagtgggagctaaatgacgagaacacatgaacacacagaggggaataacacacactggggcctatcagggaatggagggtaagaggagggagaggatgaagaaaaataacaaatggatactaggcttaatacctgggtgatgaaataatctgcacaacaaacctccatgacacacatttacctatgtaacaaacctggacttgtacccctgaacttaaaataaaagttaaaaaatgaatataatatgttgacaacatgattttatgaagcttactgtcaaatgttatcaagttgaatcactagtaactcacactaacttccatttcaatctgtgactcctcaaggttaccttattctcctccttgagctctgaatctgctgagatttataaaaattctgacttgatcacagggagatgatcaggctctgggagtgggaatttgagagcaacacaagctgctgcatgaaatgagggtaagtgcttctcgaagttgcttctgatcatactgcttctacccaatgctccaggaactaaaattcttcttgattaggggagaaaaaataaccattttttaccagtgcttgttcaacataggttattttgacaaggacatagttgagtaattctgggttatggagtaaaaatgacaagttttatttattagtctcaattgtcaataaaatatcccacagcaaatatagctaacgttcatgcagggcagctgcagagagagactgtacattttaagcatattctcaagagtccagttatattatgaaaccaaaagaagtgatatatataaaattaagaaaagcaacataagagatatgaatcctagtttccaaactcaagtgtataataaatatatttgatttgttttgccatgactcaaattagtattttaatcctatttctgccagaatgacagaaactgaggatagagcacttttgtttccatgagaaatttctgtcaagaagtgagaagaaagaaagaaatagataaaacacatggtgaagaagaaataagaggatagtctgcagggctcaaggactctgttctgggcatgtctgggacaagaagggataaggtgggtacctcaaagacaacccccagggcagagaggctgctgagagacctgttgatctagccttggaaagtagcagcacaagcttggactcccagctctgaaaaccggtgggatgggctatctgtgagttggtatttcaagccaccattgccactttgaccctgtaaggcaccggctggcactggcaatccaaagaatttgcctgaaggagctatagaatttgatgttatggatttatcatttgagcgcatcctgattacatcaccaccctattgtggattacagagttctctctcaagtatcttttagaaaatcattgaatgtcagagttggaaagtggcagtcgtgcttccatgattttcaatctcttactttcagttcagttatatggaatgtgatcactgaaatcttacccagaacatcaatccataagaaagatggaggttgagcttccctgtgtgaaggcagacaaggactgtactcgggaatccagacaagctggaggttaggagctccaggctcctctgctggtccaggccctatggaacctcccactggtgggcattttgtaaagtgatttcacatagagctagcccttttattttcttgtcagtcctaggagagacgcaggcagtgccaatgttgagttttgcctgaaggttaagaaattaccttgcctttttgtgttcagaaaagactttctgcaaagaacccttccccataagatttagaagagcctcccagatgctcccttgtttacctgtgacaagatcagccacagacccttcaaactccctttctttacctcaaaagtgattagccgaactgcttgtcttcactgattgatcagagcacaatgcatcttaatcaaactttgattaagctcctctccatcccccagttccctcgactttggcctgccctcagcctgagccagtacaatctctccctaagggtctgtgctgaaaatagactggcctcagggtagaatattctctgatttgccctcggatcttgcctccctatcatcccacttccccatactgggttctttttagcctgatttactgctctataaaaagaaaccctttttgcctaacccttgagaggcttgcagaccttatgttcacagggttcaccatattgcaataacaaggaggtaacactccccaccccaagctgcaataatcctttgaataaaatctctccttactaggtccaggtttttcatttgtttatttgtttgttttcaatttgacagtgggtatcttgatgtccattctgtggaagtggaaattaaggtttgacgtgtatcttggtctggttgtcaggttcatgggcagtggcagaagttgaattcaaactcaagtcctcttagactttagtcctggaactctccatactgccatgtggattccttctcaatgcatgggcaaaagacttcacttctgtaagcagaggaggttggaagagaagttcctctcagttccacctgatttagggatgagactgagagggccaaaagctccaggttactgcccaaaatagctgcgttaaatgggaagcccagatatttgggcacctggggtcttcctaagtggggctgtcttggtagaaaatattcctataggaatacagacacaaaaaggagattataggctcagcagacgcaagggaaatgaatttccccatccagcctaaaatctaaaagtacaaatccatttgctaaggtttcatataaaagaatctatcaaatgaaatcttatccagggcatatcctggcttgttcctcctatcattgaggtttgcatctgcctcactctggatgcctgaaattatcttctgtctgtcctgtcagagtgaattatttctaaggaaaatccagagaagacataaagagagtctctgagttaaatgaagatttaggcagtgcagcatggtcccccatccgtggcagctgtagcagcagcatcactttggaacttgtcagaagggcagattctcaggcccatccagacctcctgaatcaggaactctttgtaggcccagcctcctgtgttgtcataagccctccaagtgattctcattgcactcaaggtgacctggggtctcaggtggggcctggcccagggaacactcctgagggtgaggacaactctgctattccagactcctccttcctccagcagctatgccctataggcagctactcctcaccctctctcaattcctctcccttcccaggtgttgttaataactgggtttttttggcagttcctgtattcaaagaaagaaatcaaaatgtattgagccccatgaatgtgccagacacttgggcttggcatttctgatgagttatttatgtgatcttcataaaaacccaaagagaagaaaaacatgtcttgtgtttcatacagagggatatttgagttttgttagaagaacccttgaaaggctaaaagactttatgacctaaagggatttctattggtggaatttcctgcactttatgggggtgggagtgatattttcattgaggaggaaagcagggatggcatgtgctgtaaggagactgcacttctgaagggcaatctgtcaggactctgaaaacagaagtactctgaaaacagaagtacattcctatcacataactcagcaattccactctgggtcataggtcccaaataaactgtccccaaggtccacaggaaacaggaaagatgcccctgcagcattgtctgtggtgttggtggggcagtggtttagagatcatccacatgcccaccacgggacggatgaaaaacacgatcatgccggcttctgggagcagaggcctggaggtgcctccagccacacagggagcttacaaatataatgctgtgtaaaatgagacttataagcccaactccatttatataaacataaaaacatttcttgcattttacaagaacacatacaaacaaaaggatggatgtcaaaccattagcatgtttgcctatgaggtgggatagggaaatgaaactggcgaagtaggacaagaggagatttaataaaacaagacgagggttttgcaccatcaataaagagagttgccatgaattcaggaatattagtaaagaaaagcaagatacagagatgagtaaaggaaatcacataacaaatgacagtccccagagagcttcctgatgtgccttccagggctgggaccaacacaaagatgttgtagcctctgtgggctcacgtccaggggagcagcatgtcctttcggtgcatgaaagtcagctatggcttctgaagacctcatagctgaatctctgttctgatagcactaaatttagtgcctttttatctgcctgcctcagggtggatctgcgatctttaggcaatagcagaagaatttgcctgctctctatcctggaaaatctatacataggctggattatttactggcatcaaagaaatctttgaggtggctcatttgactcttcattttatgatagaagagttgaggcaccaagaggaaaaataaggtgagtgacagaatgagactagaacgtgacatcttgattcctagtcaaggaccatttctgaacccctgttgcatagagtcactcagggagctattgagaaacaggattctagggccccctgtacctgaggtttggattaaataggtctgggggaaagctcaggagcctgtattttctaaaagtcctctgttgatactgaaatgaagctgggttcaaaaaccacactctcctatcctcaaatacatccacaaaggacagtaaagggagagggtataatactggccagtatgtttagaacattttcaatctgagaggccaagggatttctcttgtgagaaacatctacagggtaccccaaacaggtagagaggtttttggaggtcctcttattttagggacagtataatccaacttcctggcatcctgctccccactcttttgctccccaggtgggacaagccacttggtgacaatcaaccgatttccactctgttcttccttagctaattaggtactgcgccactattgtgatgcatcctaccctggctaccagggaagatgtacataaaatgagatggggaaccatctcttaaagtcatcccaggccaggtgcagtggctcacacctgtaatcccagcactttgagaggcccaatcgggtgggtcgcttgagcccaagagcttgagatcaggctaggcaacgtggtgagacctcgcctctagaaaaaaacaaaatgaaaattagctgggcatggtggcatgtgcctgtagtcccagctactcgggagattgaggtgggaggatcacttgagcccagaaggtagaggctgcagtgagctgtgatacagccactgcactccagcatgggtgacacagagagaccctgtctcaaaaattaaatttaatttaatttaatttaaatttaaaaacttagctggggatgatggtgtgtgtctgtagtcctagctacatgggaggctgaggcaggaggattgcttaagcccaggaggctgaggctgcagtgagctatggttgtgccactgcactctagcctgggtgacagagtgagaccctgtcaaccctgtctcaaaaaagccatcccaggcccatgggggaggtaggggaatgaatcactacaacgacagagaactggaagacaagcggggactgaagaactgagatctggattggcaaaatagttttcctcaggtggcatttttattgcaaactaaattttatgtatttattcttcaatgttattttttgtctcccaaaactgtatataacaatttcacaagtaacataagaatgtctcaactttgagattacaaggttattatgggtattttgaaagcttaagatggtcactatagataaatgaccagtttctaatttggtgttaaaaaggattctcatgaatcatagtggatgtcaattggattgtctggctccagcttctcttcctcctctcattacagctaacgagaagcaggtgttttatacagcatacctctgtccttctggcctcagttgattggtctaagggtgggcacctgacccacgttgggccagtcagacccttctctgtgatttttggacttcttaacaagaaggatgagacaatcttgctctactttctgaagctgagggctcctctgcgtcgggcactgtcctagactctgaggctatggcactgaatagagaagatgatgtgtcttctttcgtggtaggcagttagaatctggtagatgtggggagacagataataaataaacacacacaaaaaatataaaacgcataaagcacaaaattggtcacccaggcatcatcattataaaaattgtttcatttataacaataatagcaaacactagtgaacctctattgagcacttactatgtatgaaacacaatgctagtggctttatatgtattaactcatttaatcctcaaaaccacccaaggaagtgagttctgtaattaatcccatttggagggaggctcttattttatcaagaggcaatgatgaaaactatagagaagagcagaggtgagactttaagttaatggttccagattttcctaatgcccagctgtgtttctgcctgtacagttacttatgttgttcgtttttcttcatttcatgagttaataaattttcctctgtctttaaactttccaaactgaatttctgttatctgttaccccgaactgccaagacactatggaaacttatcaggattaatcaagtgacctctacatgcgtggcaaggacaggtgttaataaaatgccaaggatgagctgacatggacacagctccagccctcgagaagcagcttgcaattcagtaaagacactgagacagcagggacagaggctgcaagaggaaaatcagtgatgtaattcatcttctctcttcattttgccctcctttgtggcaggcacaccatgcatagcacaccccttatttgtgcaaccctgatcattctgtgagctctatgaccaaaatgccggctcccggacagtggggccccaactgccctgacacctggtgggcccctgattccagcatccaccctacacacaatttcagattaacgaagaaaaaatttcgaggtctgactatagctgtcagctttcaacttttgttttacagcttgagttacccatagcttttcactcaagtgacccactgtcttttgggtgtgtgtggagtggtgcagatgacagtggacaactcaggagtactaactgctgttttcttcctcctctgaaagtctacctcaatgccaagtgagtctacatagtggaatgaatggacaaatagcctgtggaatgggcaggatggcctacgaattagatcttgggctttggagtcagactccagatgagacaattactagctctatgaccttgggggaatcactgccccattgcactccccaacttcctccacctgtaaatgtacatgcttcccatgtaacactgtttcaaggattaaataaaggaatgcacttaaatgcttaaatagtgcctgatacacagaaagcacttcataaatggcagttatcactatgcccatacgaaagcagagtgaatgaataagtagagctatatgtacagtaaaataagtctcaaaaacataatgtgtaaaaaaaagcaaaagaaagttgcaacaggggccaggtgcagtggctcacaccataattctagtaccttgggaggccgaggcaggaggatcacttgaggccaggagtttgagaccagtctgggcaaaaaactctgaccctgttgctataaaaaataaaaaataaaaaacagccagtcatgatggcatgtgcctgtagtcccagctactcagaaggctgaggtggaaggatcacttgaatcacttgagcccaggagtttgagattgcagtgagcaaatattgcaacaccgcactccagcctggaagacagagtgagaacctgtctcaaaaataaaataaaataaaataaaataaaaagaaagacaggtgcaacaggatacataaatacagtgtgatacaatgtatgtaaaatttcaaacacaaaatagtatatgttgctaatgtccatatatctctgtatattacataaatataattgtgtatataaagtagcattatatagtgctatataggcataagttgtatatcatgctactttatatatacaatatatcttttgtatatgtaaaatatatatatacacacggctgggcgtggtggctcacgcctgtaatcccagcactttgggaggccgaggcgggtggatcacgagttcaggagaccatgctggctaatacggtgaaaccccatctctactaaaactacaaaaaattagcggggcgtgttggcaggcgcctgtagtcccagctactcgggagactgagacaggagaatggcgtgaacctgagaggcggagcttgtggtgagctgagatcgcgccactgcactccagcctgggtgacagagggagaccctgtctcaaaacaaacaaacaaacaaactatatagatatatatatatacacacacacatatatgtacacatatatatacacatatatacgcttatatatatacatatatatgtatacacacacacaagtggggtgtgtgtgtgtgtgtgtatagtatatgcaaagtagcatgatatactgcttatgcctatatatgtgagctacctccaaaggggcaagtgacaaaaatgaaggcttcttatactgcttatgcctatatggcagtatattatgcaattatatacatatatataatacacacacagttgtggttttatatgtgggtgctgcatgtgtgtgtgtgtatgtatgtatattagaaagcacaaaaccttgtaataggaaatagatgtactactttccagatagtagttacctctggtggtgatggtctggtcatggtaatggtgtgtgtatgttcacagagaagtggtagtctgcacgcttgaaatgtttcataattaaaaattttgaaaaatgcattaaaaaaacttccatctgataactagaaagctgccttcttcatctgtattccacttggctactcgaactccctttttgatatgcaagagaagttgcaatgtgatacccatctgaaatgtgaatttttaataaggatttgggaactgggatagttccaaattggggtagtgtggctggagagagagggtgaggtgggagaaagaccaggagcctggagactggtttttataaatttacattgttcatttttatatgatttggagaaagaaagagacttagagggagacatcacagacaggttgtgtaatctttcttggttcgtgttctcaagtatgaaatcggaataataaatcgtattttacgaggttgctgtgagaagtaaataaacacagaacatggcacttggtaagcataccaaatacctagtgttatgacattcaatttatatttgaagcttatatgtgacagacttcagggaggaaaagaaatctatcattgccaagctgaaagatggtttctgcaggagtcagagcacccagtggaatctcactcctccaaatcaatagatgcattcaaaataccaaaaataaaacatcaaacgaactctttccagtgtggttctgaaacccagcacatattttcctaccctgggatttgtcagagcttcatgcatacagtgcagggagggaaagtaggaagctcctatcactctgtttccaagcaagactaggttggatgtggggaaggggtgagtagctcagcaaagctaagggaaggcaatatttaggaaagaaagtgttgcaggtaaaggagggagatgctgcagagagaacagcgagtatgtgaggtacccccaaagcagcaagtgacaaaaaagaaggctgaataagtccatccatctgatgccatggatgaaaaagcttggcaacgaacgggggtgagaagtgggagctccctcgtgtggcagctccatactggggagacctctgagtctcctaatccagcttgtgactttaaggtgaactgaaagaaagatgtagtcaatctatccatcagggaactaatgtaataaggagacttgaagaccataaatgaatcttcagtaaggggatagggtgctccttgcaactggaaaagtcaaagctcctcgataatgccaattctgccaattattcagttcctgtactgttagactcttgttctctatagacatggacatttaaatatatagtaaaacaatatgttgccattttggctcaaacttcaccaaaaatcatttttgttgccgtaatcccagtgctttgggaagctgaggccgaaggatcacttgaggccagaagtttgagatcagtctgggcaacatagtgagatcccacctgtacgcaatatttaattttatttttttgagacagagtcttgctctgtcgcccaggctggaatgcagtggtgtgatctcagctcactgcaacgtccgccttcgaggttcaagtgattctcctgccacaacctcctgagtagctgggactacaggtatgtgccaccacgcctggctgttttttctaaaatatttaaaatttttaaaaaacttagccagacatggtggtgagcatctgtagtcctagttacttgggaggctgaggcaggaagatcactggaccccaggagttcaaggctgcagtgagcactgatcctaccactgcactctagcctgggctagagaatgagagagacctctctctctctctctctctctgtctctgtatatgtgtgtgtgtgtgtgtgtgtgtgtgtgtgtgtgtgtgtgtgtgtgtagttactgctgcttttagcatagttactgctgcttttagccacaatagatgacaaagggaatgtttgtagactgtaagccaggaggcaacttgatatggtgagaaaagcatggatttgatgtcagatatacccaggcacagtcattcattcactcagtcaatgaatatttatagattatgtactatgtgttggatttgcagcatttacgttctcgtggaggaaggcaggaattaggaaatgaatggcaagatgatttaagggtgtggtgtgtgctgtgaagaaagtaaagtgaagtggtagaattcagagtggctgggaagagtggggagccttggagtggacaattaggaacggcttccctgaatgctgagtagccagctgagtatagcaagagctcaggcccctgctggaggcaaagcccttgacatatttagtagagtgaaggctggggtggcagagggcttatgagtgagggtgatatgagatactgtctcagaagaaactttaagtacgagtttcattagttatatgatcttatcaagtttatctgctttaggttcagtttgctaaacataagaagacaatggtaatacccacatcagcgtgttgttaggattataagtactaaataaaacataaagggcttggttcaatgtctgaaatgtagttagtgttcaataatgagagttattgttatcactctattatttggttcaattatttcatcaagtttcccaataagtttggatttgtattgggcttttgggaatttgccagaggttgagaagttagaaatactttgtatttttggagaattgagaaagcatctatctgttggaaaggttttctggtgacttagtattgtggggatcaacagcaggataaccggataaattaatggtaggggcttagaaaggttgctgaaactgaggataaatggtagagtccagtctgtatttccctcaaattctttcaataggaaacctttttcaccattctagattgatgtgaactggatcatgtcgctcctccgcccaaaattccccagtggcttctcatctcaataaactctgacgttctctcatggcccccaaatccctgggtgatgtagccttcttcagccgtggggcccttgctgcttctcaaacacactgaggaccattccacttcaggacctttgcatgcgctgttccctctgcctcaaaagctctcccctacatccctgagtggtccactccgattcctaaaacatggattggatgttacctatccagaaaggccttcttcaatcaccacatcgaataagacttctcctgttctcaccctgccttagttttcttcagactcaatattactgcataaaatgtgatttctttgtctatttagctatttactgcctccttccattagaaagttctctccatatggcagggactgggttttgttcactatggatgctccagctccaggaatgcagttagatttagaataaatatctgctcagtgaatggatatacagtcctcatggctgggagcttttcccaaagtctataaccaactttgtcatttctttacatgccactcagcaaatctcgttattcattcattaaactcttttttttaaattttattttttatttttatttttgttatactttaagttctagggtacatgtgcacaacgtgcaggtttgttacatctgtatacatgtgccatgttggtgtgctgcacccattaactcatcatttacattaggtatatctcctaatgctatccctcccccctccccccatcccacgacaggccctggtgtgtgatgttccccttcctgtgtccaagtgttcgcattgttcaactcccacctatgagtgagaacatgcggtgtttggtttctttttccttgtgatagattgctgagaatgatggtttccagcttcatccatgtccctagaaaggacatgaacgcatccttttttatggctgtatagtattccatggtgtatatgtgccacattttcttaatccggtctatcattgatggacattttggttggttccaagtctttgctattgtgaataatgccacaataaacatatgtgtgcatgtgtctttatagcagcatgatttataatcctttgggtatatatccagtaatgggatgactgggtcaggtggtatttctagttctagatccttgaggaattgccacactgtcttccacaatggttgaactagtttaccgtcccatgaacagtgtaaaattgttcctatttctccacatcctctccagcacgttgtttcctgactttttaatgatcgccattctaactggtgtgagatggtatctcactgtggttttgatttgcatttctctgatggccagtgatgatgagcattttttcatgtgtttgttgcctgcataaatgtcttcttttgtgaagtgtctgttcatatcctccgcccactttttgatggggttgtttgtttttttctcataaatttgtttgagttctttgtatgttctggatattagccctttgtcagatgagcagattgcaaaaattttctcccattctgtaggttgcctgttcactctgatggtagtttcttttgctgtgcagaagctctttagtttaattagatctcatttgtcaattttggcttttgttgccattgcttttggtgttttagacatgaagtccttgcccatgcctatgtcctgaatggtattgtctaggttttcttctagggtttttatggttttaagtctaacatttaagtcttaatccatcttgaattaatttttgtataaggtgtaaggaagggatccagtttcagttttctacatatggctagccagttttcccagcaccatttattgaatagggaatcctttccccatttcttgtttttgtcaggtttgtcaaagatcagatggttgtagatgtgtggtattatttctgagggttctgttctgttccattggtctatatctttgttttggtaccagtaccatgctgttttggttactgtagccttgtagtatagtttgaagtcaggtagtgtgatgcctccagctttgttcttttggcttaggattgtcttggcaacacaggctcttttttggttccatgtgaactttaaagtagttttttccaattctgtgacgaaagtcatagcttgatggggatgacattgaatctataaattaccttgggcagtatggccattttcatgatattgattcttcttatccatgaacatggaatgttctatttgtttgtatcctcttttatttcgttgagcagtggtttgtagttctccttgaagaggtccttcacatcccttgtaagttggattcctaggtattttattctctttgaagcaattgtgaatgggagttcactcatgatttggctctgtgtttgtttgttattgatgtgtaggaatgcttgtgatttttgcacattgattttgtatcctgagactttgctgaagttgcttatcagcttaaggagattttgcgctgagacgatggggttttctcgatatacaatcatgtcaactacaaacagggacaatttgacttcctcttttcctaattgaatacgcttcatttctttctcctgcctgattgccctggccagaacttccaacactatgttgaataggagtggtgagagagggcatctctgtcttgtgccagttttcaaagggaatgcttccaatttttgcccattcagtatgatattggctgtgggtttgtcataaatagctcttattattttgagatatgtcccatcgatacctaatttattgagagtttttagcatgaagggctgtttaattttgtcaaaggccttttctgcgtctactgagataatcatgtggtttttgtctttggttctgtttatatgctgcattatgtttattgatttgtgtatgttgaaccagccttgcatcccagggatgaagcccacatgatcatggtggataagctttttgatgtgctgctggattcggtttgccagtatgttattgaggatttttgcatcaatgttcatcagggatattggtctaaaattctctttttttattgtgtctctgtcaggctttggtatcaggatgatgctggcctcataaaatgagttagggaggattccctctttttcgattgattggaatagtttcagaaggaatggtaccagctcctccttgtacctctcgtagaatttggctgtgaatccgtctggtcctggactttttttgatggtaggctattaattattgcctcaatttcagagcctgttattggtctattcagggattcaacttcttactggcttagtcttggaagggtgtatgtgtccaggaatatatccatttcttctagattttctagtttattggcatagaggtgtttatagtattttctgatagtagtttgtatttctttgggattggtggtaatatcccctttatcattttttatggcatctatttgattcttctctctttttgtctttattagtcttgttagtggtgtatcaattttgttcatcttttcaaaaaaccagctcctggattcgttgagtttttgaaggtttttttgtgtctctatctccttcagttctgctctgatcttagttgtttcttgccttctgctagcttttgaatgtatttgctcttgcttctctagttcttttaattgtgacgttaggttgtcaattttagatctttcctgctttcttttgtgggcatttaatgctgtagatttccctccacacactgctttaaatgtgtcccagagattctggtacattgtgtctttgttctcattggtttcaaagaacatctttatttctgccttcgtttcgttatgtacccagtagtcattcaggagcaggtgttcagtttccatgtagttgagcagttttgagtgagtttcttaatcctgagttgtagtttgattgcactgtggtctgagagacagtttgttataatttctgttcttttacatttgttgaggagtgctttacttccaactatgtggtcaattttggaataagtgcaatgtggtgctgagaagaatgtatattctgttgatttggggtggagagttctgtagatgtctattagggctgcttggtgcagagctgagttcaattcttggatatccttgttaactttctgtctgttgatttgtctaatgttgacagtggggtgctaaagtctcccattattattgtgtgggagtctaagtctctttgtaggtctctaaggacttgctttatgaatctaggtgctcctgtattgggtgcatatatatttaggatagttagctcttcttgttgaattgatccctttaccattatgtaatagtcttctttgtctcttttgatttttgttggtttaaagtctgttttatcagagactaggattgcaactcctgcctttttttttgttttccatttgcttggtagatcttcctccatccctttattttgagcctatgtgtgtctctgcacacgagatgggtctcctgaatacagcacactgatgggccttgactctttatccaatttgccagtctgtgtcttttaattggagcatttagcccatttacatttaaggttaatattgttatgtgtgaatttgatcctgtcattataatgttagctggttattttggtcattagttgatgcagtttcttcctagcatcaatggtctttacaatttggcatgtttttgcagtggctggtaccggttgttcctttccatgtttagtgcttccttcagaagctcttgtagggcaggcctggtggttacaaaatctctcagcatttgcttgtctataaaggattttatttctccttcacttatgaagtttagtttggctggatatgacattcttggttgaaaattcttttctttaagaatgttgaatattggcccccactctcttctggcttgtagagtttctgccaagagatccactgttagtcttatgggcttccctttgtgggtaacccgacctttttctctctggctacccttaacattttttccttcatttcaactttggtgaatctgacaattatgtgttttggagttgctcttctcgaggagtatctttgtggcattctctgtatttcctgaatttgaatgttgccctgccttgctaggttggggaagttctcctagataatatcctgcatagtgttttccaacttggttccattcttcctgtcaatttcaggtacaccaatcagacatagatttggtcttttcatatagtcccatatttcttggaggctttgttcatttctttttactcttttttctctaaacttctcttctcgcttcatttcattcatttgatcttcaatcactgataccctttcttccagctgattgaatcagctactgaagcttgtgcatttgtcacgtagttctcgtgccatggttttcacctccatcaggtcatttaaggacttctctacaccagttattctagttagccattcgtctaatcttttttcaaggtttttggcttctttgcaatgggtttgaacttcctcctttagctcggagaagtttgatcgtctgaagccttcttctctcaacttgtcaaagtcattctccatcaagctttgttccattgctggtgaggagctgcgttcctttggagggggagaggcgctctgatttttagaattttcagcttttctgctcttattttccccatctttgtggttttatctacctttggtctttgatgatggtgacgtacagatggggttttggtgtggatgtcctttctgtttgttagttttccttctaacagtcaggaccctcagctgcaagtctgttgtagtttgctggaggtccactccagacctgtttgcctgggtatcagcagcacaggctgcagaacagcaatattgttgaacagcaaacgttgctgcctgatcattccccttgaagtttcatctcagaggggtacctggccatgtgaggtgtcagtctgcccctactggggggtgcctcccagttaggctactcgggggtcagagatccacttgaggaggcagtctgactgttctgagatctcaaactctgtgttaggagaaccactgctctcttccaagctgtcagacagggacatttaagtctgcagaggtttctgctgccttttgttcagctatgccctgcccccagcggtggagtctacagaggcaggtaggcctccttgagctgcggtgggctccacccagtttgagcttcctggccactttgtttacctactcaagcctcagcaatcgtgggcgcccctccccaagcctcgctgccaccttgcagttcaatctcagactgctgtgctagcaatgagcaaggttccatgggcgtgtgaccctccaagccaggcacaggatataatctcctggtgcgccgtttgctaagaccgttggaaaagcgcagtattagggttctagtgacccgattttccaggtgccatcagtcacagcttcccttggataggaaagggacttccctgctcccttgtgcctcccgggtgaggtgatgccttgccctgctttgtctcatgctcggtgggctgcacccactgtcctgcaccaactgtctgacaagccccagtgagatgaacccagtacctcagttggaaatgcagaaatcacccgtcttctgcattgctcacgctgggagctgtagactggagctgttcctattcggccatcttggaactgcccccatcattcattaaactcttaaagatcttttgtgtttatacagatttggcatttgctgaccttagctcaagatgatattaatgcaggcaatgatgacgctggagactgcagtgagagaaggtgttacccctcatccgaactgccattgccaggtgtttattacaaaaaaaagaatcacctgagaaatatgtgaatataccctccttacattaagttgaaacatttccctttcatcacagctctccccaatccccaaccccttcaaccctccccaaaacaaccatttttttttaaaacagtgtggattataaactcccaaatctttttctgttcacttgaacatgtaaaaattacctggagaaaatgagtgctattttacatacatgttattatatttggattcaaatttatgtattattttccaatttaattttatttcacacaatcttatgttctagaaaaatagctatggtaatacatggaggctgacctcatttttgttgattaatgtttgcatacacaccttttttcatcctttactttcaacttatctatgctgttgattttgaaatcagttccttatcaacagcataaagttggtcattttgtttatccattttgccaatctctgcattttaatcagtttatttagataatttacatttaaagcaattgcaggaggacaggtccctggatggcaatggctgatccagctcttccacttttgcttgcaatcctcaggtagtctatattaagaatgaggtatcttgagataaggagatcatgtctggaacaacccagactgtgtcctaactcctagaacaaggtgtcctgcaaggcttgagctcaagataccaagtgtcacccaaggaatgtaaacccagggcacagcaggtttgggtccctcagctgcagtgcaatgtggagcaaatgcagtcaagactccatctgccctgggcagctttcctgggccgtggaggacctgcttgtcatggatcctaggctccagttgacccttgctgcctatctgtgagtaataaatccaatccactttgcctgacttgtgtgagtgtctgcctcatcaaaccagatccagtcactaggtagagaacctttgtgtgattattgacacgttaggacttaagtctgccatttcgtctgcccccacccacccctgccatcaggagcatcagggccacagggggagctgatggcaacatcacccctgtcccagatgctggcccaggcccagcaaggacttggagcccccaccccagactgtgaaggggcatggccaggggtgcagtgttccacagaggtagtgggagctggggaaaagtgggagccctgctccttccaagttggtggggcgggagctccccaggtataactgcagctgcccaagctgtggctgcaacccagcacccttgtgctcttgggagttaggaggaggcagggtactcaccctcctgggaggtgctgctgccacccaagtcatagctatggattcgggcctccagctccatgcagcaggcaggagccctgcctcctgaggtacagctgcagctgcccagaccagggctgcagacccaggcatttctgcatgcttggggggcctgggaaggcaccccacaccattgcagacatgcaggttcctgctcccactgcctggcttctcctggctcctggcacctgctctgatctttgagcaaggttaaggacaagcccaggtgctgtcacagcctggccaggtatgcccaggcttgggggcagtgttgacatgccaacaccctggcaccccaatcccctctggactttgggcacctagaagtgcaggaggggaagctgagggtgactgggtgctgtcctgcaggtaccctttggtgccagcagcctggccaccatggatggctgtgggagacagacaagctcctgggcagaagggggtggttcccagtaaggcctcaccttcaggtctgaaggccaagggctgggatcccagtcctgcagatgggagtggggacttgtggtgcctcttccagccccacccatggctgcccttgtaccaatcagcacacactttctcccttctgaggttcataaaagccccaggctcaggcacagcagggcagaggatggagaggatgaagagacctctggacaaccagctacagagaggagcaacgctctctgctgagagcttcagagacctgcagagacaagggaactaccagttgcaaagagaagcaatcctctctagggcctcctccctgctgagagcagcagatgtggggaagaccagtagcagagaggagctactctctccagggcctcctctctgctgagagctgaacactccatgggacaacctggctatagagaagagctacccactacccactgcaggtcctctgagctgtcgtaacacttaataaagctcatgcgtgtcttgtttacccttcacttgtctgtgtacctcattcttcctggatgcagggcaacaacttgggcaaaggtgctgctggccacagaggtttctggccagaaaatcagcaccccaaagatcccatagcaattttattatgtgttttccatttgtttcacctctttttcgttcctttctttgttttttattgttttcccatgggctgttcaaacccattttaagaaatctatcttgacttgatttttttttttttttgtcaagaggaaggaagcaccagaagggggaggaggtgtcaggctctttttaacaatcagttccctcagagttaatagagcaagaactcactgattaccataagaatggcaccaagccattcctaaaggatctgccttcaggaaagagacacttgccaccaggccctacttccaacattggggaccagatttcaagaggagacttggcaaggccaaacaaaccatatccaaaccacagcaagcagcctgaatgcatgcaggcactctgtttaggtttggtgtgcaggtcttggtttacctttatgggctgttggtttcaatggcaatttaattttcagagactgtatggtgatattttagtctgtgtggcgtggtgatttgggcgctcctcaaaatgcgacattagtaatccctactagtgccacttgatggggtgtaggagtttccctaggccaggccacctatgctctaaatggggcaataaagtatctgctgacattgatgatgatgagtgcttcctggagtgggtgcttgttttgaatcttctcattggtggtgactggctgcccagtgtctctaggtggggaaagagagtgtcaggaccatgaggacaaataggtgtcctgggtcaagtgcttgttatagtggtctctctcttgcctgggctgcccagccatcttgatacctcccagtaagggaaataagtctcaggttcaatggggaaaggcagcacttcatttgcccacttcctttagcagggctccctgtcaatcaccctcgcacttgctctcaggctcacctagtgttgtcagcagtgctccaaggtgtcctgggggaggaatgagaccacctcaatctcattctgttgctaagttgggttgccttctgctgttgtgggggtggtcctaaaatgtcctgcttcagtgttcttcccccagttctggggttcctaaccagactcctttgccctcttgcctttcagagttgtcctctggttgccccttgtgtcatttctgggctcatacttgccaaaggttcatagtgtttgagtagtcttcaaaatatacatttttagttatcttaactatatttcatttttgttatgttttgtatcttactactttctgcttttatctttattattttatagctctattctctttgttgttctttttttctaccttcctgtgttgataaaaaatatttcgtgctaagtcacaaaacctgctaacaaaaaccaataaactaagagatattgatgttttactgaaaaaattacatgaccaattttaaacatcctaaattggatctgtttaaaaaagaaaactatgatttgttatcagtttagctacatatataattctaggattcacatattttctgtcaccactttgaagatattaatctactgtcatcttgaatataaaatgtttgaatatagaccagctttattgacttcctttcaatgaatagaaagtgatgctgctttacttgtgaagtttggaaccttgccaccatgctatgaggaggccgaggccacatgatgagatcatatgtggctcctttggctgatagtgccagactgaagtcccagtcaagagccagcatcaagaccaggcatgtgtgtgaggaagcctttgagatgactctatcttagttaacatctgactgcagctgcatgactaccccatgtgaaaaccacctagctgagcccagttagcccccagaaatcatgatttgggtccctcagctgtgccattaactagccatgtgactttgggcaaattatatgacttgtctataagatggtcctcgtgatacctacactacagagttattctgagaactaattaagataataattccccaaggtaggtattattttgatcattttacccatgagaacatgtactgggaaaggccaagtaaattgctgaaagtcagctaaacatataacaagtgacataatgtgattttggactttaaaaaatctgactctaaagcatgttctctttaccattattcattttcattgctaaaaatgatcaccatagcaacccattaacctacctaatttcacattaggacctagagaaacaatatcatctttttgcataccttactttaacttaagtccgacttggcaacaggctaacgtagtgatgccatttaaagcaaaatagaaaaaagtgtaccatggtttgaaatacctgagcccataggcaggttaagcagacacctcaatgtgccagtgtgagagagaacagtgagttctttttggcctcactttctgataatgctgtttttggaaaatgaattttaccaaaatagcatgccatgcatgaatcttattcaaatgccagggttgctgttggagctagaatgtagatacgttgcagattatcatagcgatatagaagggaaaaggagctgagtaacagggagagaagtgtggtgagggtgatggaaatcttaaatgttttcacactctcaaaattctcatatacattttctctccactggtggatcatatacatcatcagggattaaaatgttgtcacaaagtcaaaatgatcagaaatagcaaaagccatgtattctctggacatatgtttccggaattaatcataatatgaatccaaaagacaatgtcatggttctacgtttgacacatcaaagaatagtgagaatttgttttagaaggagaagtttactcaaagtctctttctaaacaatggtttgctgctgctacattgatttatctaattatcattattattatcatcatgggttaatgtttgttgattacttatgcaatcttgttattgctatgcaatatatttactaggtactagacagcattctaaatactttcatgtattacctccattaatgttcctttgatgcaaatactttttaatgcacattttacagttgaagaaattgaggcacagagaagtaaattcagttgtcagcctaggaagtttaggatgggcaggggggacaaaattcacattcagagcccaagttcttaacctgctctactatttaatattaccattttcaatactaactatagatggcatttattgttacatgtgctgggcttaatgcaaaacacttcaccttgaccaaagcagagggatggaagagagtgaaaactgaataattttctccgtgtgtaagtcaatgttctttaattccttgctctcttcctttattattccttagtgaattatttgggttctttgtgctacagcattgaaactcatggggtcatagaaaggtagaacttggggtgggatggattctgggccttttataccagttccccaatttaacacatgagatctggatgtctatagaattctgaaagctgtgttctctgtcctctcgtggcaggagtgaaattattcaaaattatttttttacatgtgaggctttgcctcggactccctgaatggccctggccaatgtctaatctcattgggcctcagtgttcttatccatgtgataaacttgttggtttgcagtatcccagagccctcacagtcataggctgggtgaatgcctacagtatagcccaagcactctcagatttatgccatttcattttcatattatgatataaagcactcatctactgatatggtctggctctgtgtccccactaaaatctcatcttgaattgtaatccctgtaatccccatgtgttgagggaaggacctggtaggaggtaattggatcatgggagcggtttcccccacgctgttctcatgatagtgagtgagttctcacagatctgatggttttataagtgtttgacagttcctccttcacatgctgtctcttgcctgctgccatgtaagacatgccagcttccactcccgccatgattataagtttcctgaggcctccccagccataagaaaccgtacgtcaattaaaccccttttctttataaattacccagactcaggcagttctttatagcagtgtgaggatgaattaatacatctacataaagatacaattttttctgcaagtgtgatgagatcaatgctttccaaaatgtgggccaagaccacccactgagactcctgcttataagaggaaaaggagcaggagatgaaataaggttgaatcacacacttctatctcggtccctctgcctttatcaaggtgaagtctcacttgggaggcaatgtgtctttatcactctccagcacttactcacctctttttttacttaataaagagccttcccagacaacatatctatctagccaaaatttagtaacaatacttaatgttttccttgtatttgtttttagtttgcttctatttgagtcaaataaaaatgtttttctatttgctgtagtgcaataaagactgtttaaacattgatttatttaagagaaaaagttgatttcgagaaaaaatgttaaatagatattagtagggatacatgccagttatttattgtggtttaatcaagcacccccaaagttaatggctcaaaacaacagtattaagattactattgcatgggtgaacaattttggctgaacttaattggctggtttttctggtcttaactggttctctcatgcctctgaaatctgttgaagtctgtcaatctcttctcagaatagtatttttacagtaaaagtaacacatgtagaattgcaaaggaagccaattatactaaaatacaggtatcaaaatatacaatttttggtattgcaatatattgatttcttattaacacattcattaatgaggtctagtggcaaatcaatcaactaccataattttgaatagtggtaaatgtgaacagtgtttcaagatccctgcaacaactgtgatgtgatataaaagtatctgttatttccactggctccaaagtcatggattctaataagataattgtcatttgttgcctaaattaattatcaaaataaacgtcaaatctcattcaaaagatagcaaaaaataacaatttttttccatataggtttataggtcttctctatctaaagggtaagtctgctcattggttatggccacgctctttgcattattttttcctttagaaaaggatagttgtgaatgtcaaaaatctgaggatacagtggttctatggtaataaatatttgttccttcaaattgttgttggcttttattacttgggaaattttataggctgtgtgttgttcagttgtgtttagtataccacaatgttcttcctaaatcagatctcaggctctttggcattctgctagcagaaggctgtctttaatccttctcttcgttccacaggacccctgtagccttccttgatgttatcaatttcttaaatttttccacaggattctctgatacctaaatgttctgacattctaatacatctactttttatatgtaattggtggtttgagaatgaagattgtgaggtgaaagggagtgatagtaggaagtaaataaataagggggaatgaagaatggtgagctgagatccaaagatggttttttgttggtgcttaggaaatgttggagtgtccgagtgacagggttggtattgtaaacccaggaaacagctatgttttatcccatttctctgcctttcctgggaaaaactgggttctctcctttttgagtaattctctaagtatcatgagagatgtcacaaaaagattcaagaaatgaacacagcctaaaataccttgtccacttccaaggactttaaatatgtatttatcatgctttgctatgtgggattgattagggtgtagagaccatttatgcaagaacatctgaatactacattattacatgtttgcagtgcacaaaaatatttccatttagagcagatttaggaagtgaaaatctgagaattaaaaaaagcaaagacaaccagcccagttatgcatagctgagtgacctatattggttacaaagtttttatctcttcattagaattgtaaacagaactctctgcaaaagaaaggatgatgctgtaaatacaatggtatatagccaagcaagtcagccaagaacactgttattctgggggaagttgagaatgcagaggttccaatggctttcatagggattaaaaaaaaatggaagtaacaattttttccatgcagaatgaaatgagagatggtacctgactgattcagtgtcaaagctaagtatttatttgtacccatttgcctgttttcctactgtatcatcaaatacacatgattaattcaaagcattatttcttttacttgttcatttttatattacacaagtaataaatatttgtttaaaaaacacaaacagtacaagtaaaaggagaaaattctttcgccttctaccaatctcatccctggagataatagcctttgtcagtttactgtgtaatcttacctgatagatttctaaatatgcatatccacctacatgtgtgtatgaacatgtaatcaaaataggatttttatacacatttttctgcaatgtgtttcttttacctaaaataactgtcttccttcttcttatatctgtattagaagaaaattcttatttttttaagaactgtgctatgtgaaattccattgtatggttgccccatcatttatttaacattcatctaacgcctggcatttaggttgtctcctactcaataaatattgagaatttgtaatcctctagggatgccgtggaggagtacaaaccatataaggaaattcctctcctctcaagtagtttgaggctggatatgtgagtcagacatattgtgtaacaaataggcttcagatttcagcagagaatgctaagaattcccaatgcaacagaatctaatagccaactgaatcaaaatagtctaaaaaagaaagatattgtgcacgagcatttctcagtagaaaatccaacatatcacaatagaatggttaaagggcaattattcatagtagagattttttcttacaaaatatttgatttgttaagcatccctctagtacttaaatcttgatgtttttatcagcagctttttgataccctttaggacacctgccaagtaaaagaaagcttgaatgttaggaactcctaaaggttggagctatatcttcatttcccagatatttaagtggaaagatataattcaatatattcaaaagaggttcccctagtgtgctaggaacttttagcgtctcttcagatcatcccaggctcacctgtctccaggactcttgcttcctggctttcactttggagagcaactttaggtagactctcatcactgtcagtgccacagcagacattgtgcaggagctgcctggcagtaccttgtctcaagcccacagcttgagcctcttgtcttcaatacagggctgtcttccatcttgccactgaggcttaagatatatcaagacctgcctggcactcacaggggtgcatggcaaggtgaagaaaagttaatgcctgatggggtagacttttgatcagtgggagatgaaagctagtggataaattctcctcttattcctttgccaccctgccaacagactgtcttgagactcagtagcccttaaggcctctcagaagcaggatccatgaaatagtacagttagctggttttattatgaagcagtggccatctctatagtgccctaactcacacttgctctgttgtcttctctgccctactcctttccctcacttctgcttccctggaattgtactccgtaatgcaggagttttcagctatgttgataagctgttgtctcagaatctgcttttgcagaacacaggcaaagacaacataaattgcacaaaacattatatagtgcacatcgtctggtcattacctagtacatagcaaccatttattgagcaccaactaagtgtgctgcaatagggccaagtgctttatacgccattgaataatcaccctctctaggaataggctattgctattaactaaattttgtattctatagggaagaaaactgaggctcaaagagtgcctcactcaaggttgtattagatcactttctaatttgtttctttctttatcctagcatgttattgtgattggtggagaaaagaggaggtgggggatgcctgctccacaagatcactttagccttctttgacctcaagattctccattcctcaagctctcaagtgtgtgcatcaagttgctaaaaatggagtcactgaacaagaaagataggttttgaacttagagtcgtatgcatgtggcaaagtagcagtgatgttagctcagaaaaccactgatgcccaatcaggaaggcttggctcagccaatgtgtgatgctgttgttcatggcataacggctctcacacctgggggatgagaaaggttagcacatgttctccactaaaaccatccccgacttcgccaagtgccacacaggagagagggtcaaagctctgcaacgaggatcttcaactctggccattcttgctcgctcattgtaatctctgcttctgccctgtctactttaaggtgggcccaatcctacaccaagttgtcgaggaaaatcttccctcctcaactgcttggcagccttctaaaaataagccttccaacctaccagggccaccacactgctcagcaatcatttctcttgtcctcagtgctccctatcattccattctgcaatgtagctgctccaagcttttactactcttccgccttctctcacattgtccccagcccagccccacactctcaagtgaaggaagacgggagctctttacattatttcctctccacaacactaaatttacctaggtcttcccatttctgctaactcaaaattatgctctctgtggtgctcccaggtagcctagtgggatgcaggagaaaccacagaacttcatgctgggcactttccctcccttcattttatatggtacaaaatgtgtaagaaaaaataccataggatttttgttgtaatcctttaaaaaataattagcaagctttttgtgtgtgtgtgtcagtcttatttataaaagttgctgctgagggcagttacttctttcatatggattccttgtggaagagatggaccctcaggtcaggtcacttcaattgtggtcacacctaagaagtcaggaacctagaagtgagagagataagcatccagtttttttatttttcttttgaaatcaagtctcactctgttacccaggctggagtgctgtggcacaatcatggctcactgcagcctcaaactcctgggctcaagcaatattcccacttcagctcccaagtagctgggactacaggcacatgccaccacacccagttaatatttttaccttttttgtagagatgggtctcactatgttgcccaggctggtcttgaactccagggcttaagtgattctcttgcctcggcctcccaaagtgctgggattacaggtgcaagccactgtgcccagctcagttctgttttaattaactatataaattgtacaaaatttttataaaagttatcatctcttgagtcacagtagggtataaaacatggcacagaaaaccctccgcagccaatttatttctatgttcatctattgcaagaacaaattgagcacagcagcagccatgataatagcaggcatctgtgctttgggctggtgaaaataaattaaatttgaggttggtcatgagagcatgtcaacagcactgcctgtgaattattaaaataaaattcaaataagagaaagcaaaagccctttccacagaactaaattaaagtttaaattaaagcaacatttttttcttggcaaaaattttctaattattttctacctctaaggtttatttccattaatccttcctctatgcaattaaacacatggaaaaatgcacagtaaaatttcactagtctagtttaaaaggaagatatttgtttaacaaggtttgcagtgggcttgacaatcagatgctttaaaatgggttgacagagtgctgcttcattgagtttcagtgtcagcaaatactgatagctcacctattatgtgctagaagcagtattgagtgacttaaacataaatatccaaaacagtcctccgagttgggtattatcatttacattttatagagaaaatcacaaaacttctttaatatctgacatttagtaagcagtagagatggaatgggttctgttaggggttagattttgttccttcaaaattcatatgttgaaatcctgactccatgtacttcagaatatgactgtacttggagaatcagtttttaaaaagattactaagttaagatgaagtaattagggtgggtcctagagaaaccaatccaattttcctcccagataatatcaaaaaactgaaacttcctagatcactgcgtccagacaataagacgccaggtcccttgtctgagcacctgctgtctgttgaccgactcctgtataaacccttaactttaattggttggagaaacagatttgagacttgtcccccatatcctggctgatgtcacctgcaataaagcctttcgtccttggcaacgctcattttctcagtgatcggctttctttgtggtgagcaaccggacctaggccaaacccctggcgtttgacaacactaatccaatatgactggtgaccttacaagaagaggagattatgatacagacacacagaaggcagatcttgggaaggcacagggggcgggcggccatctgcaagcccaggagggaggcctcagaggaaactgatctgctgacaccttgatctcaggttcctagcctccagagttgtgagaaaataaatctttcctctttaaaccacctactctgcggtactttgctatgccaacaatagcaaattaacacaggttcaaactccactctcagcaccaaaatctatattagttaactaatgctgcagaggagattaccacactgttagtggcttaaaacaataaatatttattgcctcacagtctctgtgaatcagaaatttgggagtggcttaaatggacagttctggctcatggtctcaggaggttgcagtcaaactgtcacctgcaggtgcaatcattggaaggtttaacagtggctggagaatctgcttccatcatggcctctccatggctgttaggaggagtccttagctcttcctcacattgggtatccttcctaggactgcttgaatattttcaggacttggtggcttcatgtaatttagaatttcttaactctccatgataaccaaaataacagagtttaccctagttttctgacactggcatccttaatttcctttccaaactttcttcatgaaagtagaaagaaaattttacctaaccttgacccacaaaaaggggtgactaagtaactgagatttctgggcttagcttaacatagacatggaaactgctctcttccacctttagggtgtacacggtgtagctttgtagttaggctgttttggtccaaatcctggctctgcttcttattaggtcttacagcttggaccatttttaaaaactttttttgtgccttggtttcctcatctataaaataggatgataataataataattttatacagatgtagcaaggattctgtaagctaatacttgcaacttatttacttcccaagacttgcttttctttgtgttctttggatttttcctccctttccctcccttccttccttccttccttcctccctccctccctccctccctccctccctcccttccttccttccttccttccttcctcccttccttccttccttctctctctccttggtccaaccaatggtttctactagacactgtagacatgtgttaatttggttgtatcactaaggtctaaaaaatatcactgtgaattgaatgaaacctagagcataaaaatccaagggttctttctaagtcagctgttggttttgtgcttgctatggtgtttgattgctcggtgcttactcttgctacttgctatatgaatatgcatatataaaaggcccagggcttgggggttcaggctatattttactttactcaccataaattcctgtgaagtttatatcttaaaaaaattcactaagaacagtcaatagtcaccctgaattcaaagttataaaaaaaaattcaattaaaagacatcagtaaagcacgtgttaattcagacgaaggtaagaaagctcaacaagaaaatggtgattaggtaggaacagaaccaaactagtcttttgttattttctttttaatagagagagggtcttactctctcacccagcctggagtacagtggcacaaacatagctcattacaggcttgaactcctgggctcaagggatcctccaaagttggtgggactacaggtccacaccgccacacccaggtaataattattcttcttcttcttcttttttttttttttttttgtagagacagtttcactatgttggccaggatggtctcaaactcctggactcgggtgatccttcagccctggcctcccaaagtgctgggataataggctcactcctgttaatagaggctaaatgtggattatcacttgatatggtttggctctgtgtcccacccaaatctcatcttgaattgtaattcccacatgtctaggaagagacctgtaatccccatgtgtcaaggaagggaggtgattggatcggggttggggcgggggcagtttctcccatgctgttctcgtgatagtgagtgagttctcatgagatctgatagtttaataagtgtttggaaattcctccttcattcttctctctctcctgctgccatgtggggaaggtccttgttccctcttccaccatgattatgggtttcctgaggcctccccagccacgtagaactgagtcaactaaacctctttcctttataaattacccagtctcgggtagtatctttacagtgtgtgagaatggactaatacatcactttaatccatatttaaccttgatggtacctgcatcatatgaaagggctgtgtatttggttcatgtaggtgcctatgttatcaggggttctggagcctgcaagtcttatcttgggttgatctccaaaaagaatacttgcctacataaaagtgaattcaagtagcttatttagcaggtgatcccaggcagcactggtaagagaggggaggagtgagacaggaaagagaaggagggcaaggaagagtttgaattcagcacattatcactgtgggcaaccaggaatcagtcctgatggtgacctttgggagacaatatagaacatgcctgagagctgtccaaccaagtggcaaaggatctggggtgttaacctactgattcctgccagttactggttggaaactgctcctagggagcattagctctccagcattcccagtgaaccccacacttggattctcagggctacagaaagccctcatgcacacataggtgctatgctcaagaattgtgattgtgaaggggattgtgaagggggtgcttctttcctagagtcaggctctaatagatataatttacagagatttatcttgtttcttactcaataattagttgatacacagtgaaaaaacaggtaaaatgtatgcagcctaaaacactgtggtcattagtcacagagcacaaatatccagaaattctaagaggcagccaaggccacctgagtcatgactgtggctggttccacccaccacccttctactttcctaatgctgggagatcatttttcttcttcaaacattgtatcatgtcttgcatgggatatttgaaaacactaaaatttactctttttctgcacctggagattttatagttatttttctagtctacaaaagtgccacaattatagaatataagggttttttttaaaatgaattctgtccttgtatcaaatattcaagccacaataaatgtttctcagaatttccctggtcattcaaatgtgcatcttaactaaaggtctgtgacaactgttttccttttgaaaaattatttttcttcttttaatcgcctatttgaaaatatacgatagtttaatgttgaaaagctcttagtagggggcagggccaagatgaccaactagaagcagtggtgatcaaaggctcccatcaaaaaaaccataatagcatgtgaatcttgcaccagcaactgaggtaaccaggttctctcatcagaacagtctagatgactggcattacctgcggagaggaaagaagagcagtgtggtgcagctgcccacctgacagccacacagggtcgtggagcccacatcccccagccaagggaggtagtgagtgagcatgctacccaaccagggaaaccgtgctttttccacggaactgtgcaacccatgtatcagaagatcccactcatgaacccatgccaccagggccttgggtcccaaccctggagccatgcagattctcaacagcctctcagctagaatctgcttaaacctgctgagtttctgcggggagagacgaccagcaccacagctgcagctgcctgctgtctaagccatttgagccccttcggggaagggcaacagccagctctgggacagagagctgcctgacacactaagctccctaggcaaaggaagggcgtcatccctctctgcagctccaggctgtgcttttcccctgctggagccagggaggctggatagcttgtcctaagaagtgtcccccatagcccaacacaccagctgtggcagactacagccagagtgcctcttcaggcctgaccctgacccatcccttctcactgggcagggactccctgcaggaactccaacaactccagccaggggctcagggacagaactctgatctccctgggcctgaggccctagagggaggagtggttgcagtctctgcagaccagaagacagcatttcctcctgctagctctgaagaatctgggcagccaagatgagtgggtttccccacagcaaagcacatcccctccaccaagggacagccaaagtgctttgttaaatgagtcctgttccccatgccacgcaatagggtttgtcagacaccctatgcaggagcgatcctactgtcatcgggttggtgcccctggaggtcagagatcccagaggaaagagcaggcacccacctttgttgttctctagcctccttgagtgacatctccaagcacatgagcaaaccaaatgaatagggcctgaagtaaacccccaggaaaccgcaccaccccttcagaaaatgcacctgatcattgaaggaaaaacaaacaaacagaaagcaacaacagcatcaacaacaaaaaaagtccccacaaaaccccatccaagggtcagcagcttcaaagatcaaaactagacaaactcatgaagatgagaaagaatcaatgaaaaaatgctgaaaacccaaaaggccagagctcctcttctcctccaaatgatcacaatgtctctccaggaaggatgcagacctggatagaggatgagatggatgaactgacagaagtaggcttcagaagatgggtaatagcaaactctgctgagctaaaggagcatgttctaatccaatgtaaagaagctaagaaccttgataaaaggttagaggagctgctaactagaataaccagtttagagaggaacataaatgacatgatggagctgaaaaacagcatgttaactttatgaagcatacacaaatatcaatagctgaattgacctagcagaaaaaaggatatcagaatttgaagaccatcttgctgaaataaggcatgcagacaagaatagagaaaaaaatgaaaaggaacaaatgaagccttcgagaaatacagaactgtgtaaaaacactgaacctacgattgattggagtacctgaaggagatggggaaaatggaaacaagctggaaaacacacttcaggatattatccaaaagaacttccccaacctacaagacaggccaacattcaaattcaggaaatacagagaacaccactaagatacttcttaagaagatcaaccccaagatacataatcatcagattctccaaggttgaaatgaaggaaaaaatgttaagggcagccagagagaaaggccaggtcatctacaaagggaagcccatcagactaacagcagatctctctgcagaaaccctacaagccagaagagagcaggggccaatattcaacattcttaaggaaaagaattttcaacacggaatttcatatccagccaaactaagcttcataagtgaagaagaaataaaatcctttccagacaagcaaatgctgaggaatttcattaccaccaagcctgccttgcaagagctcctaaaggaagcactaaatatggaaaggaaaagcaagtaccagctactgcaaaaacacaccaaaatataaagaccaatgacactatgaagaaactgcatcaaacagtgtgcaaaataactagatagcataatgatgacaggatcaaatttacacataacaatactaaccttaaatgaaaatgggctaaatgccccaattaaaagatacagactggcaaattagataaagagtcaagaacctttggtgtgctgtattcaggagacccagttcacatgcaaagacacacatagactcaaaataaagggatggagaaaaatttaccaagcaaatggaaagcaaaagaaatcaggggttgcaatgctagtctctgacaagacagactttaaaccaacaaagatcaaaagagacgaagggcactacataatggtaaagggaccaattcaacaaggagagctaactatcctaaatatatatgcacctaatacaggagcatccagattcataaaacaagttcttagggacttacaaagagacttagattcccacacaataatagtggaagacgttagcaccccactgtcaatattagacagatcaatgagacagaaaattcacaaggatattcaagacttgaactcagctcttgatcaagtggacctaatagacatctacaaaactctccacccaaatcaatagaatctacattcttctcagtgccacatagcacttattctaaaatcaaccacacaattggaagtaaaacactcctcagcaaatgcaaaagaactgaaatcataacaagcagtttttcagatcacagtgcaatcaaattagaacaggattaagaaactcacttaaaaccacacaattacttggaaattgaacaacctgctcctgaatgattcctgggtaaataacgaaatcaaggtagaaatcaataagtgctttgaaaccaatgagaacaaagagacaatgtaccagaatctctgggaaacagcagtgttaagatggaattctatagcacaaaatgcccacatcagaaagctagaaagctctcaaattgacatccaaacatcaccaattaaaagagctagagaagcaaaagtaaacaaatccaaaagctagcagaacacaagaaataactaagatcagagcggaatcaaaggagataaagacaagaaaaacctccaaaaaataaatgaaacccgaagctgtctttggaaaaaattaacaaaatagatagaccactagctagactaaaaatgaacaaaagagagaagaacgaaatagacacaataaaaaaacgataaagaggatagcaccactgaccgcagagaaatacaaactaccatcagagaatactataaatacctctatgtaaataaactggaaaatctagacaaaatggagaaattcctggacacaaaaaccctcccaagactaaaccaggaagaagtgaaattcctgaatagaccaataacaagttctgaagttgaagcagtaattaatagcctaccaaccaaaaaaaaaaaaagcccaagaccaggtggattcacagccaaattccaccagaagaacaaagaggagctggtttcattccttctgaatctattccaaacaattgaaaaggagggactcctccctaactcattttatgaagccagcatcatcctgacaccaaaacctggcagtgatacaacaacaacaaaaaaaacctcaggccaatatccctgatgaacatcaatgcaaaacttctcaataaaatattggcaaaccaaatcgagcagcacatcagaaaacttatccaccacaatcaagtcagcttcatccctgggatgcaaggctggttcaacatacacaaatcaataaatataatctatcatataaacagaaccaaagacaaaaactacatgattatctcaatagatgcagaaaaggcctttgataaaattcaacatcccttaatgttaaaaactctcaataaagtaggtattgatggaacatatctcaaaataataagaggtatatctatgacaaacccacagccaatatcatattgaatgggcaaaagctggaagcattccttttgaaaactggcacaagacaggatgccttctctcaccactcctattcaacatagtattggaagttctggccaggaccatcagtccagagaaacaaataaagggtattcgaatgggaagtgaggaagttaaattgtttctatttgcagatgacatgattgcatatttagaaaactccatcatctcaatcccaaatctccttaagctgataagcaacttcagcaaagtctcaggatacaaaatcaatgtgcaaatctcacaagcattcctatacaccaataacagacaaacagagagccaaatcatgagtgaactcccattcacaattgctacaaagaggatgaaatacctaggaatacaatttacaagggatgtgaaggacctcttcaaggagaactacaaaccactgcttaaggaaataagaggggacacaaacaaatggaaaaaacattccatgctcatggataggaagaatcaatatcgtgaaaatggccatactgcctaaagtaatttatagattcaatgctatctccatcaagctaccattgactttcttcacataattagaaaaaaacactttaaatttcatatggaacaaaaaaagagcccgtacagccaagacaatcctaagcaaaaagaacaaaactggaggcatcatactacctgacttcaagttgtactacaagcctacagtaaccaaaacagcatggtactggtaccaaaacacatatattgaccagtggaacagaacagaggcctcagaaataatgccacacatctaaaaccatctgatctttgacaaacctgacaaaaacaagcaatggggaaaggattccctatttaataaatggtgttgggaaaactggctagccatctgcagaaaactgaaactggaccccctccttacagcttatacaaaaattaactcaagatggattaaagacttaaatgtaagacctaaaaccataaaactaaagagcttctgcacagcaaaataaactatcatcagagtaaacaggcaacgtacagaatgggagaaaatttttgcaatctgtctatctgacaaagatctaacatccagaatctacaaggaacttaaacaaatgtacaagaaaaaaaaaacaaccccatcaaaaactgggcaaaggatatgaacagacacttcttaaaagaagacatttatgcagccaagaaacatatgaaaaaaagctcaacatcactgatcgttagagaaatgcaaatcaaaactacaatgagataccatctcatgccagtcagaagggtgattattaacaagtcaagaaacaatagatgctggtgaggctgtggagaaataggcatgcttttacactgttggtgggaatatatattagtttaacaattgtggaagacggtgtggcaattcctcaaggatctagaaccagaaataccatttgacccagcaatcccattactgggtatatacccaaaggaatataaatcattctgctataaagacacatgcatacacatgtttattgcagcactggaaccaatccaaatgtccatcaatgatagactggataaagaaaatgtggtacaccatggaatactatgcagcctcaaaaattaatgagatcatgtcctttgcaaggtcacggataaagccagaagccatcatcctcaacaaactaacacaagaacagaaaaccaaacaccacatgtcctcactcataagtgggagttgaaatacgagagcacatggacacagggaggggaacaatacgtactaggccctgttgggttgtggggggcaagggaagggaacctagagaatggttcaataggtgcagcaaactaacatggcacacgtatacctatgtaacaaacatgcacgttctgctcatgtatcctggaacttaaagtaaaagtaaaaataaaaataaataaataaagctcttagtttatcctgtaatagaatattctctcaccttctttttattgtcttgattaaaaaggacaattatcataatttaaatatgtgtatataagaatattctcctctcaaggcatatcatcaaataaaacaattttatcaactttttctataaacacatttaaatatacagaaagtcaaaagagaagttcaatgagcacatataaccccacaacctggactcagcaattattaacctatttccatatttgttttatttcttttcttttctttttgtttttttagaaggagtcttgccctgttgcccaggctggagtgcagtggcacaatctccgctcactgcaagctccacctcccaggcttacaccattctcctgcctcagcctcccaagtagctgggactacaggtgcctgccaccatgcccaactaattttttgtatttttagtagagacgcggtttcatcatgctagccaggatgatctccatctcctgacctcatgatctgcccacctcggcctcccaaagtgctgagattacaagtgtgagtcaccgtgcccggcacctatttctttttatatatatatatttttagtagctgacatcatgaaacattttctctaagtattttgtcatttgttttctaaaataagaatattctcctacaaaatcacaatattattattctacctaagaaaagccacaatcatttaataatattatctaaactaggtaatattaatattatcttgattagataactagactatagtcatatttctccatttttacgtgtctaagtctgttttatgttgctgtaacataatatcacagactggatcatttataaagagtagaagtttatttagcccccatttctggagactgggaagtccaagagcatggcaccagcacccggtgagggctgtcttcctatatcataacatggtgaagggtatcacatggagagagggcgagagtgtgccagctcagatcccttgtcttcttcttattaagccaccagtctcatcatgggggtcccaccctgatgaccttatctaaccctaattaactctcaaaggccccacctccaaataccattaatatgtgaatctggggattaaatttccaacacatgaaatttgggagacacattcaaaccacaatattacctaaaatatcttttctagaaatattttttcaaaccagaatgtttaatctagcgtgatcttcctcagatatgtttttttccccatagcatttacttctttaagagatcaaaccagctatcttgtggcatgtctcttattctagatttctctcattgtttcttcaagggatttaatttgttcctatttctcttgtatgtcttacaggctagaaagaaaatccaaaggcttgattaaattacaaagatattaaacattgttggtaataattcttcataaatgatgctgcctaattcattttacattacatcaggaggcatataaaatcagatggtcccactatttgtgataaatgctgttgttggttaaggtggtggcttatggatttctctaccagaaagatacatttcccattgccactgccaatctatggagtgatattctggcataagtcctaatatagttttaacttatatttttataactagaggttgataaacaatattgaagtatataacttctgatttttacaagttgctattgtccacatagcattcatctctttgtttctgtataataaatgtgttcaactacattacagtcagcaaactaaagcccatggaccaaatctggcccacttcctgttttcataaataaagttttattgggacacagccactctcatttatttacatattatctgtgaccttttttttttttgtatcgtgtcagcagagatgagtattgtaacagaaatcctatggcccacaaagccagaaatatttactctttataaaaaaaaattgcccccttcccaccccagaattagacggtctcagatctctctgagtgctagcattgtattttgcatattcctgccagattatctagcaccaaatctggctggtgagtacctagattcttacaatagctttattgaggaataactggcatacaataagttgcacatatttaaagtgaataacttgaatagtctgacatactaatatatctgtgaaaacatcactatgatcaagatattgaataaatctgtcacccacaagtttccttacatccctttgtcatctctttcccactccacagtaaccattggtcagctatagttaccatagattagtttgcatcttccagaatgatatataaaaggagtatatacagtatgtactcttcttttgtttggcttttgtcactcagcataattattttgagatttatccacgttcctgcatgtgaaggaaaccaaaatatttcacaacatcctaagccccacctgcaaccaactgaagagaccctttcttagccaagaggagcccagaaaaaccttaaaaatggaattcccagtcacgatgggaagggaggttgaacacacttcattataccccctctcttttggaatttacacacaactgaccagcattaacgtttcagtagagatcacaagactgacagaatggactctttgtggcagtaagataccaaagtataaaagacctaaggcaatgcaaggccaggattaagtcacaccctacaaaccaaaaaatcttgttaaacttttttaaattaacctgatacaacgtagcttaatatccaacctgactatggtatagcatcacatgacagacagtaggaccccttatcttaacataagcattcctttgtattgacttcaagtctttagacaaagcacaactctttcaaccaattgctaactaaagatttcctaaaatccacccatgactgtatagcaggtaggcagacataagcagggaaggagagcacccctgtccccaaccaggaatgtcaggcgatcatcaggtgatggtcaggcagttgtttactgtctctaaagtaataactggttgcagccagtgccagggaaaggcagtctccctgtagataaaaaaacccctgaatctggtgatcagcagcttcctgataagaactcaggagttgggtgagtgggctcacacatgcacattaagaggcaaaatggcagagtgtaactggtatatgacctcctaaggaaatacagctggtaagggaagaacatctttggtaagcattcatacaactccgggaaacacactgtgcttgctcccctcccaagtgctagcaagcactgcacatgcagacaacccaccccaagggaagaatcaggggagaagggacacaagaccctggaagtgtgccaacatataaaaccccaagtcaaaaggtcaaaccccgcgcttgccctccaaggtgcccatgtggccctcatctaattgtgctttactttcttttcattcctgctgtaaagctttttaataaattttcattcctaccctaaaacttgccttggtctctttttctgccttctgtccaccagtcgaattctttcttctgaagaggcaagagttgaggttgctgaagacctgtatgaatttgccaccaataactagactacctgccaccactaacatgacttgtaagctttgagatgtcccatatctgtgggctaaaccaatgaatgctatccatgtattgatgtataattttacctacaattcctctcttcctaaaatgtgaaaaaccaaactataacctgactgccttaggaccagttaaggtttctttgatttgtgttttctgtgggctgtggtcactcatattggctcaaaataaacctctttaagatattttacagagcctgttttttcattaacaccccagaatatgcttctctgatgtatttcaagatggctattcaggaggtctggaaatataaaaatggctgaaaagccatcttttgtgggggagatttgcatctgtagagaaaatctgcactggcacagccaagctttctctgaggtcctcccttgtccaatctaggaaagatgaactgagacattgacacctttaaagtctgaaagaaacctataccatctattctctctgagggctgccacctgagaggtttcatctacataacaagaccacctttgctagccacgtctcctcttctcccactgccataacccacttgccaccatccaagccctattctttctgtaacctcaagatggtataaaagctcaaccatcttgcctttctttaagatcttatatattttgttccacaagataatgcctgcctctcaggctcattcaaattcaaaagagaatcatttacaagttaattcctgtctccctggttcattctttctccctaatactcacttactgtcctgcaagagaattgtctacattcctcatatcctccctcccttatgaaaaaggtatataagcttcttcaactcatttagggggttggggtaaacactccatggttctcctcatgcatgttaataaatctgtatgcaatttctcctattaatctgccttctatatgttgattttccagcaaacctccagagggcaaaggggaagctttcccttggcccctatacctgtctccttttttattgctgagtgttattccattgtagaaatatactacaatttatttgttcggtcacctgttaatggacatttgggttgtttccggttttacgttactacaaatcaagctgctataaacatattgtacaagacattatatggacacatgctattatttttcttgagtgaatatctagaagtgaactgtctggatcatatggtagtgtgtgtttaacttttaagaaacagggcaggtctttaaaaatgtttatagtgacttcacattcagaagcctctgtcatttagggttgtgtttcattaactttttattgtttttaaatcccaagatagaaaattataccaacagtcaagagaaattcatgaactctgatcatttatattagtaaacataatgtacatataaataaactggcacaaagtacatattgcagtcattttcaaatgatactttgaaattagttaattctagtttaagatactttgtaagtaattatatgtttcaaggattctcttccttctcagaagctacttcagtgattaaaaagcttaaaaggttgatgtctatgttttatatttccaaaaatctcagaatacaaccacaggttctgaaacttcatggtattgaggatccttttctttgagttgggagccacttaagggtcttctcattattttggaggattcaaccagatctttttaattgtctggtggcaaataacaggtggcaactctggctagctttttaaaggaaaatgtattgtcagggtgtggtccagctcccaggatgaagaaagttgaagaactgggtttgaaagaggtgagacccagggaatcagagtgccttctccaggagcatctccacagcctcccagggctacaacactcaaggaattcagctgcagcagtttctttcctccttgcatctctcaactcaagtttcaaagtctgagaatgaagcaacctctgcaccaacatcagaacatgagctatgcacgtggatgcaccaggatagcaaaaggaagggtctagcaaaagaagtcttcaaacttgccattaactattagcatgcctgtgcaagcaattgggtgtgccatcccaccaagactgcacagagtggaggagagttcatcacccccaggaaactgaaactgtcagaaaaggcaaatgaatgctgctctgcctaaaggctgacaaccccttatataggcaagtggtgttagaagagatgcattctattctcttcaagttcaatcagatcttaaaacccactttagctttctatctaatggttatcaagaaaaatgtgttctttctgcttgaccttcacttcttcaaacagaaaacaaaaccacagtgtctgagggagctaaatagagctcagatacacatgagaaatcctggcttatcattttaatggaagactgaccctgtgcaggccagcattgacagtagcaccagactattggctgttgtacagagtcctgactcaagcagcaggtaccttatttgcaattaaaacccttgactgagaagaataaccttccactttcagcaaaccgcaggtagcttctattctgcagcatgtgggactgcactaagacttgtgagaattgcacaatgttgatggcatgtggaatgttgtgcaatagcacaagttctcatatgctaggagagagtttaggtttgagacccctgagaactgggaatggatgagatgactgttaaatatataatcctatgatgtttaaagacaaaaagataaggtaagaacatgtttctgtcctacgagataactttgttgctcctagttacagaaactcttaactgcactttgttcagtctgaggaaagacttgaataaataaaaatagctagcagtagaaggaatgtccttgtgcacagttgtataaagttttaacattagcttgcaccttttcagacaacattttctaagtatttgaaaaactaagtttagacttacagaaaagttgcaaatatacaaagagagctcccgaatatcctttacccagatttccttaaggctaacatcttatgtaatttggtacaactatcaaagtcaagaaattaacatcaatgcagtactattaactaatctacagatgttatttgaattctgcctgttttcccactaatgtccttattgtggtccaggatctaatccaggattccacattgcaattagttattgcgtctgcttggtctcttctaatctatgacagtttttctttttctctcatggcctgggaacttttgaagtatacaaatcagttgttttgtggaacactctttaatttggttttgtctgatatttctctcagaatcagagtgaggctatgcatttgttatgaattgaatgtttgagtctcccccaaattcacatgttgaaatcctgacttgtagtatgacggtgttagaaggccaggccttttgggaagtaattaggtgatgagggtggagcctcaagaatggaactagtgctctaataagaagagattgccaggcgctgtggctcatgcctgtaatcccagcactttgggaggccgaggtgagtggatcacctgaggtcaggagtttgagaccagcctggccaacatggtgaaacccagtctgtactaaaaatacaaaaattagccaggcatggtggtgcacgcttgtgatcccagctactcgtgaggctgaggcaggagaatcacttgaacccgggaggcggaggttgcagtgagctgagatcgcaccactgcactccagtctgggcaacagagtaaaaccctgtctcaaaaaaaaaaaaaagaagaagaagagacacgggagcttgcttcctccatttgtcttctctctaccatgaagggacacagcaggaagacagccatgtgcaaaccaggaagtaggtcctcaccagacaccagatctgctggcaccttggtcttggactttgcagcctccggaactgcgagaaatgaatacttgttatttaagccactccatctcctgcaatttgttatagtagcctgatctaagctagcatctgtggcagggataccacggaagggccactgtgccctttcagtgcatcacgttgagggcacctggtaacaacctaacttctggtatgactcattttgatcccttgattaacgtggtgttggtgaggttcctgcactgtcgttcctgtttccctgtgctaaaatgttttaaaaagatactttgtgactatgcaaataccctgcttctcatcatacttttacccattaattttatcacccatcaaagattcttgcttctcaataattgtcacggtggcgtttacttgaaagtagttttctatttttatcacttctacgttttctatgttcatcactggaattcaactgtgaggcagaatttagcaagacttttctaaatgtctatgctgtgagggcaccgggtcaggggaccagccttccttctgttcttctagggggtcagtgctggtcagacaagctctgtctggctgtttgatcccccccacagcagctgctgagggaggaggagaggatccactccccttggctctttgctgcccctgtgttttttctcctgctgttccttacaccggaatgccttccccctcaccatctaattgttcttcaggcctcagctcctataaatccttagcagggagctttcctgtgcttcttcctccacaaccttagcacttctgtgtgctctctctgtcacagcaaagaatatgctatcacaaaacagccacattttcttttacgagtctcaccacactgtgagtaagatcacattatctctagattcctgagctatctggcaatgtctgacttacaggacctccctgggaagggttagatgaagaatgaatgaatgtaaaatggagtatttgtcacaaccccctttttcacattgaacattgcaacatatttattaaggtataattcatacagaaaaaaattcacttttgaggtgtgtagttctataaatgttgatgaatgtatagtgtcaggtagtcattaccacattaagatacagaaattttgcaccaccctgataaagttttcttgtcctctctaaggtcatttacccttacctccaccttcacccctggcaacccctgatctattctctactaatttagttttgcctttttctgaatgtcatataactggaattgtaaaatatggagcccttagaatttgacttgttttaacttaccataattcttgtgaaatccatccatattgctgtttctatcagtactttagtcctttttattgttgagtaatattccattttatggatttattatggtttctccattcaccagacactggacattaggttgtttccagttctgaggatgacagctaaagctgccacaagcattcatgaacctttttttttttttttgcatgtagacttatgtcttcatttctcatgtgaacatacctaggaatagaaaggctgggtcatatggtaagtaaatgatagacatcagaaaatgctgccaaaccactttcccaagtggctgcagctctttgcattctgaccagcactatgtgggagtttctcctcactctcaccagaacactgaaagctagggtgagtgtccccccctgttattttagacaaattatgttagctctcttttcatgggcttattgcctttttattttttttttcattcctgagactactggggaagtatatcttctctgctgaagcatgtattcagatcttttgcccatttatttttccgtcattttttattattgaattttgagacctctttatatattccgtatagagcagaacttttaaaattggatgaagtccaatttattatttttttccttttgtggtttgttctaacatttatttgttttggttgattagttgttggttaaacctccttgtctgaattcttttcttcaccttggtaagattattttggaaaacaatacaagtcatggtttctaggcaagtgacgtcattttcttataggttaaatgggaagaaaagtttcttctttttgggaaatttttgtgttgtctctggtaaaagtcaagatatttgcctgcagtgagaatgagaaaatgattgggcttttagagttttatgttagtagcagcagcaggtggaaaaggcaagaaggagtgaggatatacagcaaaagacctgacagaataaagtgatgtcaggggctcctcgcctggagggagagaaggagaagcagcaggagagggaattcggagagggaccacctttccattgacacagacatgccctcaagcaggaaataaaagtttgagaagaaggtaaaaaattattattcaaatttgtattattcaatataaaattattattattcaggtttttgtctaaaaacaggaaagaaatagaaaaaaaaccccagatgtttctatgtattgatggtgtcattaccacttccagaggaaaggtacctttttctggaagtattttctggcctcggttccctttagaaggtcagtttaaaaaaaaaaaaggaaagggaatgccatacaacagagtcaagtgtctcttacaaggagtgcctgctatgtgccagcatttgtgccaagaactatacatgctgccccccagcccaccttatttggtgtttacaccaccttgctgaggactcagcatgcaaggaggctctggtccaataactgcagaatataatagaatataagtgacccaacaatacagtataactgaaagtctgtgttgactctcttgggaaagtcaaagtttgttcttctttaccgtacttcactgcatcagccttctctttctgaagacaaatgaattcagagagaaacactgggctctcaaggtagtaactgaataatgctctgctaagatagagtgacttcgcaacatcctgtcccatcacatcctgcgctataatataggtacatcttaggacaaaaatgcccttctttgacattgtttgcatgtatcattgcagattcccttgactctacttcccttccagactggggaggttttaggtacacaagggtggccctccccagcccagcccatcataagaagcttctgatagagtcatttttcaccacctacctcacaagtaaattgtgcatcacctttcaagtaggatgggataagatcttatcagacaggccttcactaactggaaccagaaaaaaaaatctgtccatctggcctgggcaatatgccctcctggaaaattactggatagctccaaactccataaaaatacattccttaaaatgccagcagaaggcacagacttatggagaaatgaagaaattatgcagcctgcacaaagctccattcatcacaggcctggggaacaagaataaatgcccacccagactttgtgccaggaacattaataattagttcataggagctgtcactcaggaatgccccggccctgattcagattctaggcatgggagaatgtaatataaacactctgagactagagcaatgggacacttcgtcctgtgtgggttgagaatcagaagcaaccctcctgctaccaggaggcagtgagaagtgatggctttggggatgtctctatgggctaaggaaggcttgccaagttaattccagctgactttccttttctcttactgaactttttacagaaatttgttgttgttgttgttgtcttcctggcagaggggaaagctatcagactaaggtccaccgtgtgcctccttatctcttccactgccaccgtctgctctcaattgctgtgacgtcccttaaccggcctccccactttctccttctcacgatccttcatacctgtgttatgggctgaatttcatatactgaagtcctaacttccagtacatcagaatgtgactgtacttagagatagggtctttaaagaggtacctaagttaaaatgaggtcattacagtgggctttaatacaatatgatgggtgtccttataaggagaggaaattaggacacagacacacagagagaaggccatgtgaagatgcaggtagaaggcggctgtctacaagccaaggagagaggcctgaaagaaaccagccctcccaccaccttgatctcagacttccagcctccagaactgcaagaaataaaattctgttgtttaagctccccagtctgtgatagtttgttatagagccctggcaaactagtacacactgccacctcacaaatcactccatgcccttcctcaggcactgacagtgaccttctgctgcctaatgattaaaatgcgaaggtctggccctggcaatgaagtcacttttataacgatcctccttcatcttgccttacagtgccctacttacttctacgttcagctcccttgagcatcagtttttaacccacactttctcattccttggcctgtgcctgtgctgttcccatgctgacatcactcttccctcaatctcaagcatgggcccccttctccatggagattttcttactctcccagctgagacagccctctttgatatttcttctatgatgtgtataatttccactcacattctaaacatttatgcacatgttctgtgtatctaggagccatgccggattcaactttgcatttcttctagtcccaacatatttcgttgcacactagaagttctctaccaatatttgtcgaataactagtagaaataacatgtgagtgttaatgtctgtatgaacccctgctaagaaatatttgtgcttaaatgtattttaaaaggtagaatggggtaatgaaaataaccagctagtgatgaaacaagtctggctacaaatgttggccagaccaccacttagtgtctttctgcatgtcccttgactttactgtctctttgctacctctaaaggggatatttctacctcttctataggattgttatacggattagagacagtaaatgtgcaaagttgttacacatactagaccctcagaaatgttaatttccctcctttatactcatctgaaaatactttacctaaagaaataaggttctaacaggagaattttaaacattagaggcaactgactgggccagccatctttgtaggaagctctcactgtctgaggagcccacacacagtcctgtaccatgctaggtaaacaacctgctcctctactccccacttaagtcatgaatactgagaacaaggtgatcagaagagattctcattcattctagtcattagatctgacatgagaactccacatactgtttaagggcttcattgtgtgtgtccaaagggccaggggctgttatacctcaatctggcttgatgggatcctggctggcatattgtgagaatacaacacctgtgaagtttggttcatttcagcagatatttaacaagtgccttccacttgtggatctacagagtgtacttcctcaccttccgtcattttcacccccatgtggatgtaaacagacacacaggcagagcactgtgaactagagcaggtgattgcaagttcagtgggtcctcattattagtgtattctgtatttgcaaattcacctatttgccaaaatttatttgtaacccccaaatcaatacatactgcactttcaccatcatttaaagacatgtacagagcagcaaaaattttagccacctgacattgctgttcccagcagagatggtgctctgtctcctcattttagctctcatactgtaaacaagtgtccatctcaaggtccatgtagtgccacattttccacagttttgtactttttgttggtgattctgctgtttaatacagatcccaagcattggctatgctgtctaatattcacaggtgcaaaaaggctgtgacatgacttacagggaaatacatgtgattgataaactttgatcaggcatgagttctagtgccactggctgtgaattcaatgttaatgaatccacaatgtatattaaataaggggtttttaagcagaaacacaaataaaacaaggatatgtcaattggttgataaaaatatgaccagaggctcttaggaacttaatcttatatttccccttaggaacaatggttcagtatttactaattcacctttcacagtgactttatagaacataaatacagcaaataatgataactgactgcatttggtataaaattcagtttggaagttgaaagtggtagatgaggttggagagacacaagcaaggaagtttcttaaatggcaggactgggctttgtcttgctgctggagagtcaatggcagggaaacatgattaaatctttatttttacattctggtgcccatgaaaggaatgagtttgaagaagggtttgacaaggggtggtggtggataaaacagctttccaggattcttttccctgcatcagctggtggcacaggacttctaagtataacttccacttctaaaaatataacattgtgcatgcaatggactggaaaaatgagaaagcttgctccaaagagccacataagccatggttagccacactgagtgtgtggctgagcaaacacttagtaaagatctgatggtgtggtacatgcagaaacactgccaacatggggatggagacataatgaaggaaggctgcaggactttcgggctttgacaggacagggtcatggagttatttgcctgtgaacatgccctactcttcaagagaagtggaaaataaccctgaaggcaattcagagctaatcagggccaccacctcagtttcaacaggcagaggccctccacctggagccttggggacagagctgaaggggcaggacccctatctagagctatggggtggcattgacatgccagtgagcctggaaggtgagacatggagccaaagagaattattcttgagccttaagatctcatggaatttgacgtgctaggttttggatttgcttgggaacttctgctactttcctttttgaatgtgaaggtttatcctatgcctgtcccatgattatatttcaaaagcacataacttgtcagttttcacaggttcacagctggagaggaatttggcctcaggatgaactgtatcttgagtctcaccccatatgatttagatgatatttagataagactttaaattttagattttagagttaatgctggtatggggttgtcaaaatggaaggccaggcacggtggctcaggcctgtaatcctggcacttaggggaaccaaggcatgtggatcacgaggtcaagagatcgagaccatcctggccaacatggtgaaaccacatctatactaaaaacagaaaaattagctgggcttggtggtgcaagccagtagtcccagctacttgggagactgaggtagaagaatcacttgaacccgggaggtggaggttgcagtaagccgagatcatgccactgcactccagcctggcaacagagtgagactctgtcaaataaataattaaaaaaaaaaaagaaatttattttacatgtgagaaacatataaatttgggagaggcagggctagaatgctatgagttgacttgtgtccccccaaaatttgtatgttgaaacactaatccccagtgtgatggtatttggtgacagggccttggggagataattaagtttagaagaggtcatgagtgtgtgggacataatctctttgtgactgtgttaggattactgtccttctaagaagagacaccagagagctggctctctctccctcaacccttacctcccaccacgtgaggacacagaaaaaggcagccagctataaacctgaaagacaggcctcaccagaaaccaactatgctgtcaccttgatcttgttcttctagtatctagaactgtggaacaatacatttctattatttaagtcactccatctatggtattttgttatggcaaatgaatagtctaaggcagcctgcaagctgtaaaagttctagaggtgatttcggggacatagtagagagatgtttttattttattatttttgtatgtggggacaaaaatcaatttggggattgtgtgtatggttatctttctactggaaaatttattatgaggagaaaaaatcagatatttcaaaattcaaattccttcctttatctgattaatgaaacaatgcgtacatgcatttcatgcatatataacatacatatatgtatacatacattcttacacttctctttactttggaacacattagaaagagctataaattgggaggcagaagattttgtttcaagtctcgattttgccacctactagatgggatctctgcccctcagtttcttcaatggttaaataaggacaatactattgtgttagctttacccagatcataagaatcattgttggaagacaaatagaccatatacatttaaaaaaagtttaaaggctatgaagatgcaaagtatgaacatggcagaaatagaaattgcttctgaattgctgggaacccaagcctgaaataattcttggaaggaagaaagtcacttaggactttataagtgtcacattgctcttcatggtttaagaacaccaaaatagctaagaaatgttacataaggaaaatcacttctaccacttgataatagtagtttttatggaactctgcttttgctctcatctgcatgaacaaatatatccacatgcaagctaggtcctgcttcaactaaaattctaaaacaacataaaacaacaatagaaaatccttgtattagaaactgaagtggccaactaattaatttatccctcccacaattatctgtgtacccattatgtgcttagcattgtctaaaggttttaggaggtgcccagcagcatccaagcttcctttgagattacaatgcagttggggataagagaatgacacaaaagagctgttaaatagagcagggaaagtagtacaagagatgtcacaggcagatttgtgacaagtgctgacagcgtgtcaagatttcagagaatgaagagatgagagaaagctgagctaatcattgaatttcctgttgaaaagaaaggacttgagttggatattgataatcaactaggatttggataggagacaaagatgaggatggctttgattatagaaatatgagttcaggaagtcctgtacaaatccaccagctggaactatctaggcagaataacaatctttatgtacagtgtaatccatagtacaatggcaactgtactatggattacactataatccagtggtgatcatgaatgccctgataacatagcccaggccactacatcaccaatcctgcttccttttgggtcacagggccttcaaagtatatgaacccttgaaattataatttaaaacaataatgcccaaaatgagtttcatgaaaccttgataccttttgacatgtatcatcagtaagtgttacctctaaaaatgaagacatgtggttaaaaaagttcaggaaacactaaatactgtatctccactggagagcttcaatacacattattagctgcactagattgattttggtaactctgctccattcctgccccctgctttataaaatccaaaaattctttaatggtgggcacaaaacaaagatactcaactaaatgaagggcagaactcttagttacttacatctctgaaggagagaaggctgccacgcagggccacacggggagttgcaagatgcagagagcaatttatgtctggtgtatggcaagccgggtttcacaggcttcctgtgaattgactaatttgaataattttgtggactcagtacatagagactgtccctaattgtctggggtctggccccaggctaattgggtgagtgcatagtggtctgcagcgtgagagcccaataaggaaaatgcttaatcagttgctcaaggaagggaactgacaggcttctggtgggtacctcaaattgggtgaagataacatttccaaaagcaacaataaacaaaatagaccactccctcctgtgatcgctactgcattctagggtctagaagcctgataactacattactaagattccagagggaacagagttcagactagacgctgccaatggagaagcacttacatgaaaagtaaaaggcaaaagggagagagctactgttgtttctccagcaagtggcaggagtaaatctgagatttgtgagatgcaatgttttctagtcctttccagacattcccctgaacattagtcacctcaggtctggagacagtagtgatagcgacagcagcttcctaactgtggtgctctttggatctaatggtggctttacctgatctttgcgacttcaggcccttccaatagagttgtaagctcccaatcttccgcattaaatatttttatgctagaaatctacagttattgctgctttcctgactgtgtcccaacaatatagcatagttaaatttctgggaacccatgctataaaacaaaacaaaacaaaataaactagcatttcccaaatatgtttgaccatagaacctgactccccatttccccttctccccaaaaccaccttctgatatcttgaaaaattcgtttcgtggtgctccctttggaaaacatccatagacttatatgttgagaactaggagtccagaaatgtgggcttagtctcagctgtgtgaccttgggtaggtcacatcatttatcttgtttttagtttctctgctagatcaaaagaagagttgaatgaagataaccaggaattttagctctaatttgtttccattctgtgagaaatgctgtccttaaaaactatcattgttcaggtagaaaaaaataaaaattaaaaaaagaactactgtgttttcctttgccttctcttcctttttggcttggtttgcatgaatattttgagtcaagctaggaaaattccaagaaaactggcagcaagtgaataaatgctggatagctcttactaaagtgatgtggtgtttttagaactttaatatattaatgtggatcctagaaatggtcccttcagaagtgggtttccttttgtactgacactgcacagaaaggaagagatacaagaaagaaacctccagcactcaaactgagtcattttaaaatgtagcaaactccctgtcactgggaacattcaagtagaaactagatgttggcatggcagggataacataattagttttgtctttattttgctatttttctgagagggatggcacagaccatttatacagatccccacattttacagacaaggaaacaaaaagtcatagaggttatatggatttccctgggtcacacagcaaatccatggcagaactgggagaaagacactagacgtctcctccctattccccactgcactcttctgtacatctggaattcatttgggcttctttgaggagtaatgttccatcactcaaccttcatttttacatctctttaaagaagcagagtcattttaatgtgagctgaaagagactcaaggttgccagatactgtgagaaggtgacgaagtcggaaagtttgaagtcaactttttgccctcagaatccttttatttgggcatccatggcagggagaccccatgctccagccttgctgtgcccactggtgtcagaccaggcaccaggattctgaacatcccatggccccgtctaccctcagacagtccctcttgtctcatttttgaaacttcagtccctgcagacagcactgaaaaaccaacctgaatactagcgtcatctacatagtttgaaaacaaactactcacctcagagagggcacaaaatacagcctgaatgtgacgccatttgtggtgtggctgcttggagttgggagctaggcttcctctgccaactacttgacagaatccacattcgtgttctcaatgcagctggtagtgggtgtgtgtgtagggtaatggccttttcttttattatccaaatgctcttgaggagggaaccaaaaaaaaaaaaaaaaatgctgctaaagcagagagctatgtctgtgactttgcagagaaacaggtgcttaatgcagatctgattttatcctgagctttttcaccaaagaaaacccaaatgtggtgaagaagaaagaaagccactgaggttttctcttttcctaaggatggtagaaagaaaagtaacatcgtattaaaaaaaaatctgaatttttacctatggggttatatgtttactgattgggtgatgaaattattggaagcccaaacataagcatcatgcaatacactcatggcaaacttgcacatgtactccctgaatcttaaaaaaaaaaagtctgagttttaagttagctatttgttccttttgctttacattatgtgggattcatttagacttctgggagaacttccaacagtgaggaagcaagggacagttgcaaaaaggcagccctgattttccaaaaaattgtgcttggagattgtgctagaagtcaagagggcagtttagattaggacgatttgagccttgcactttttttttttttaatagttaacactaagcaacacttttaactctactctgctctcttggcccccatgctgaattgattgcagattttgttgatgatttccctttgattccacatccactgtcactctatcactattccttgccttttactcttgttgttggctgctatagtctaaatgtttatgtaccctaatcaccaatgtaatgatgttaggagatgaagcccttggagggtgactaggtcatgattagtgcccttacacaagaggcctcagagaactgtcttgccccttccaccatgggatgagagtaagaaggcaccacctatgaaacagaaagcaggccctccctagattccaaattttccaccaccctgatcttacacttcctagcccccagaactgtgagagataaatttctgttgttgataagccccccaaggtatggtattttagtatagcctggaccaatggactgagtggaccaagacattgacttcttactggcatgctacttccactctcaactctctacaattggcccatgtggcccctgaacacaaccttcttaagcccagatataattctatgagtccctcattcaaaatcctatgatatatcttgaccctcaagtcccttcatgactgtgatggttaatattgagtgccaactcgattggactgaacgatgcaaagcattgttcctgggtgtgtctgtgagggtgttgctgaagaagattaacatttgagtcagtggactgggaaaggcagacccaccctcaatctggatgagcaccatttaattagctgtcaccctggccagaataaaaataggcagaagaatgtgaaaatactagactggcttagcctccaagtctactcctttttcccatgctggatgcttcctcccctcaaacatccaactccaagttcttcagctttgggactcggactggcttccttgctctgcagatggcttattgttggacctcaccttgtgatcatgtgagctaatactccttaataaacttcattttatatatacatctgtcctattaattctgtccctctagagaaccctaataatgacctaaccagttctcttccctcctgttctaatcttgaagcagaacacatatccttgtttctgttcttcatgtgagacctgcgacatttcagaggaaagttgtgacataaatctacactttttatacctgaggtttgtcagcgatgtgctcaaggcttatgcaatgtgtcccctctcctcgttgtcttcctctgtatggagcaaagggagtgtctatgatttctcctctgagcaggacaagtattttgtaaaaggcacatttattcatctgctagacgtttgtttagatagcaggttctctgctaggttccccagatacattagtaaagaagacaagcaaagttcttgcttgtggggagcttaaattttgtgtgagatgcagataataaacaactaactaaataaaaatgataattatggttaaaaatttatcgggggtgtggtggattgcacacacaatatatagagggatgccacttagatagggttgtcaagtaaggaatctatgggaagatgttatttaagttgaaatatcaaggatgataaggaggttcttataggggactgtgttttggaaagtgaatgggcttggaggtgtagaaaaggtggccaagcagaccatacacagtaggaaagggtgtgttccagctgacctcttccctccttctgggaggacagcaaagaaatgtccggggcactctttgttgtccctccttcttctatttaacattgtattgtaagtcttagccaacacattaaggcataaaaaataaataaaaattaaagatattggaaaataagaagtaaaactattttttatttggagacagcatattgtatatgtagaaaatctaaaagaattaataaactatcagaacaaatatgttgttatcaagatcacaggatgtaagtttaatgtaaaaatatcaaatgtatttctaggccagaaacgtcaattttgaaaatgacagtaagaataactgtattatttacattattatcaaaaaaacattacattggaataaacctaatgaaagatttgcaagacatccaaaaacttatccaccatgatcaagtagggtttattcctgagatgcaaggttggttcaaaatacacaaatcaattaatgtgatcatcacataaacagaactaagaccaaaaaccacatgattatctcagtagtgcagaaaaggcttttgataaaattcaatattccttcatgttaaaaactctcagtaaactaggcattgaaggaacatacatcaaaataatatgatcaatctatgacaaacccacagccaacatcattctgaatgggcaaaagctggaagcatttccctcaaaaaccagcacaagacaaggatgtcccctcttaccacacctattcagcatagtattggatgtcttggtcacagcaatcacacaagagaaaagaataaatggcatccaaataggaagaggggaagtcaaattatccctgtttgcagaaggcataattctatatctagaagaccccatagtctctgcccaaaaactcctcaagctgataaacaacttcagcaaagtctcaggatacaaaatcaacataaaaaaatcactcgccctcccatacaccaacaacagtcaagccaagaggcaaaccaggtgcacaatcccatttccaaatgccacaaaaataatgaaatacctaagaatacagctaactagggaggtgaaagatctctacaaggagaagtacaaaccactgctcaaagaaatcagaggtgacacaaacaaatggaaaaacattccatgctcatggatataaagaatcaatgttgttaaaatggtcatactgtacaaagcaatttatagattcaatgctatttttatgaaactaccaatgacattctccatagaaatagaaaacactattttaaaattcatatggaaccaaaacagagcccgaatagccaaggcaatcctaaatagaaagaacaaagatggaggtatcatcctacttgacttcaaactatactacagggctacagtaagcaaatagcatggtactggtacaaaaatagacacacaggccaatggaacagagtagagaacccagaaataagaccacaaacctacaactatctgatcttcaacaaagctgacaaaaacaagcaatggggaaagtattccctgttcaataaatggtgctaggataactaactaaccatatgccgaagattgaaactggaccccttccttacaccgtatacaaaaatcaacttaagatggattaaagacttaaatgtaagacccaaaactatacaaactctggaccacaatctaggcaataccattctggacattgcattggtccgttttcatggtgctgataaagacatacccaagactgggccattaacaaaagaaagagatttattgaacttacagttccacatggctggggaggcctcacaatcaagatggaaggtgaaaggcatgtctcacattggcagcagacaagagaagaaagattatgcaaagaagctaccctttttaaaaccatcagatcttttaagatttattcactatcaagagaacagtatgggaaagacctgcccccgtgattcaattacctcccaccagttccctcccacaacacttgaaaattcaacatgagatttgagtggggacacagccaaaccatatcattccacctctgccccctcccaaatctcatgtcctcacatttcaaaaccaatcatgccttcccaacagtcccccaaagtcttaactcatttcagcattaactcaaaagtccacagtccaatgtcttatctgagacaagacaaatccctttgcctatgagcctgtaaaatcaaaagcaagttagttacttcctagatacaatgagggtacaggcattgggggaatacagctcttccaaatgggagatattggccaaaacaaggggctacaggccccatgcaagtctgaaatccagtggggtactcaaaccttagcactccaaagtgatctcctttgactccatgtctcacatccaggtcatgctgatgcaagaggtgggtttccatggtcttgagcagcacccccaactgtggctttgcagggtacagcctccctgctggctgctttcatgggctggtgttgagtgtccgtggcttttccaggcacagagtgcaagcactcagtggatctactatactggggtctggaggacagtggccctcttcttacagctccacaaggcagtgccctcttaggggttctgtctgggggctccaaccacacatttgcctccacactgccccagcagaggttctccatgaggactgcacccctgcagcaaacttctgcctagatatcctggagttttcatacatcctctgaagtctaagtggaggttcccaaaccccaattatgacttctgtgcactggcaggctcaacaccacgtggaagctgccaaggcttgaggcttgcaccctctgaatccactgcccaagctctaagttggcccctttcagccatggctggagtggctgggacacagggcaccaaatccttggggtgcacacagcacagggaccctgggtctggaccacaaaaccactttttcctcctaagcctctgggcctgtgatggaaggggctttgatgaagacctctgacatgccctggagacattttccccattgtcttggggattaacattcagttccttgttacttatgcaaatttctatagccagcttgaatttctccttagaaaatgggattttattttctattgcattgttagactgcaaattttctgaacttttatactctgcttcccttacaaaactgagcatctttaacagcacccaagtcacctcttgaatgctttgttgcttagaaatttcttccaccagataccctaaatcatctctctcaagttcaaagtttcacaaatctctagggcaggggcaaaatcttgccagtctctttgctaaaacataacaaaagtcacctttgctcaattcccaacaagctcctcatctccatctaagatcacctcagcctggatttcgttgtccacataattatcagtattttggtcgaagccattcaagaagtctctagggagttccaaaccttcccacattttcctgtgttcttctgagccctccaaactgttccaacctctgcctgttacccagtttcaaagtcacttccacattttcggatatctttttagcaatgtcccattcttctggtaccactttactgttttagtccactttcacactgctgatgaagacatactcaagactgggcaatttacaaaagcaagacgtttaatggacttacatatccatgtggctggggaggcctcacaatcatggtggaaggtgaaaggcatgtctcacatggcagtggacaagaaaagagagcttgtgcagggcaactcccctttttaaagccatcagatctagtgagacttattcactatcatgagaccagcatgggaaagacatgcccccgtgattcaattacgtcccaccaggtccttcccaaaacacatgggaattcaacatgaggtctgggtagagacacagccaaatcacatcaacatagggatgggcagagattttataatgaatataccactagcagttgcaacagaagcaaaaaaaaatgacaagatctaataaaaatactaaagagcttccgcacagcaaaagaaactatcaacagagtgaacagacaacctgcagaatgagagaaaatttttgcacactatgcatctgacaaaggtctatatatccagcatctataagagactttaccaaattttaccaaaattaccaaatttaccaaaaaaaccccaaatgatcccattaaaaggtgggcaaaggacatgaacagttttcaaaagaagacgtacatgcagccagtgagtatatgaaaaaaggctcaacactgatcattaaagaaatgcaaatcaaaaccacaaatgagataccatctcacaccagtcagaatggctactattaaaaagccaaaaaataacagatgctggtgaggttgtggagaaaaaggaacacttacacactgttggtggtagtgcaaattagttcaactatttgtgtaagacagtgtggcgatccctcaaagatctaaaaacagaacttccatttgacccagcaatcctgttactgagtatatacctaaaggaatataaatcggtctatcataaagacacatgcatgtgtatgtttattgcaacttaaatgtccatcagtggtagactgggtgaagaaaatatgatacatatacaccatggaatactatgcagccataaaacagaatgagataatgtcctttgctgaaacatggatatagctggaggtcatcatccttagcaaactaatgcaggaacagaaaaccaaatacttcatgctctcacttataagtgggagctaaatgatgagaacacatggacacatagaggggaacaacacccactggggtctatcagagggtggaggatgggaggagggagaggatcaggaaacataactaatgggtactaggcttaatacctggttgatgaaataatctgcataacaaacccccttgacacaagtatacctatataacaaatcttcacatgtatccctgaatttaaataaaagctaaaaaaaggatgtacaaaactatactatgctgaaaactacaaatattgccgtgagtaattaaagaagtcctaaataaatgaagtgatatgtgttgtttataaattggaatactcaatgttgttaaaaatggcaattctttctaaattgatcaatagctttgatgtaatcctaataaaaatccaaacagaatttttacagcaattgaaaaactaatgcaaaacttttatgaaaataaaaaccctacaattttggaaaagaacaaaattagaggacttaacactccttgatttcaaggcttattataaatctacaataatgattgacacataaataaatgaaacacattagagagcctagaaataggaatgtgcatatatggcaaaacgattccaaacagaagatccagcaagatttaaaaacaaaggaaactcatttcaacaaatggggatggtacaactggatatctgtatggaaaatactttgatccctacctcatacatacctccaaattagagattgtttatagacctaaatgtaaaagctaaaactataaagcttccagaaggaaaaacaggagaatattttactgttttggagtagcctatttttttttgtaaaagtactaagtataaaagttaagaaaaaaagtaaaatttaatgtcaacaaaactacaaacttctcgacaaagatgtcattaagaaagtgaacaggcaacccataaactatggaaaaggatgaagtacttgccatagaacacctacagattaataataaaaagacaacaaccccataaaagtggtcaaaggcttaaatagccactttacaaaagaagatgtaagaatggccaataagcgcatggaaaaagggctaaatatatattagtcactactgaaataaaatatttaaacctcactgaaataccactacaccaattataaagactaaaagttttaagagaccattcacaccaaatcttgtcaaggttgtaaaacaactggagctctcatttaattctgtggaggaggttgtaaaatgctagttatcttggagaattattcggcaattttcatatagtaatcatgtgaaccagaaatcccatttctaagcatttacacaagataaactaaaacacgtgtacactcacatgcacaaactgcaagaatattcatggcagctttgtttgtagtagccccaaactgaaaccaactcaaatgtccatcgacaggtaaatgtatagacaaactgtgccatattcataaatggaaatctactcagcaataaaaatgagtgaattactgatgtgaacaacaacacagatgaatcttcaaaatgctgaatgaaagcagtcagatctaaggggtatacagaatgtgaatctgattatgtgatggtcaaggacaaaactaattcatagtgatacagatcagaacaatggttgactctgtggaccactggctagaaatgggcatgagaaaattaccagaggggacagaaatgttctatattttgattgggtaatagttccagaagtgtttatattttgcaaacttacactgtacacgtaaagtctggacatttcaataaacatggaaaaaagttcaattaaataaaaactctacttttccctcctaactgcccaaaaggtaatgaaagcatccttttaaagattcagaaagccagagtgggaaaaatattggatttggaagtttagtcttttgtatcgtttttatcataccttcatttctgcaaattgtcttaagaactaaactttgaccttttttcacttctccaaattcctgtcaaagggacatggggagtcacaccctacaaaccataaaatctcatcagatgggttttattaacactatataatgtgacttacttttcaacctgactctggtatagcatcacatggcagatagcagatgctgaaagaaataaaaagattttactccaaaatatatttccttgacatatttcgaaatggctgccacagagttaacatattcaaatggccttgcaaagctcttttgtggggaaaatttgtttctgtagaaaatctccattaatttagccagacctctcccattctaggccgttcttgggtgtgggagagattaactgagagtctgacactttcaaagtctgaaaagagacatttaccatctattctctttgagggctgttacctaggaggcttcacctacataataaaaatcttggtctccacaacccacatatcttaactcaggtattcctttctctgatttcaagtctttagacaatagcttaactctcccaaccaattgtcaacttaagaatccctataactcacctatgacttgtaagctctttcttcgagatgtcccacctttttgggctgaacgaatgtgtatctaccttgtgttgatttatgatttacctgaaatgtataaaaccaaactgcaactaaaatactgtaactaaaaccaaacagcacactttctcagtatttcttgagattgtgtaatccaccctgcagtcactcatattgtctcagaataaaccttttaaagtatatttttcagaatttgttttttccatcatcagtctggattgcttacagtgacaacatcaaaaaaattcacaataataataatgccatgtgtgtggaaggtgcacttctctacagatattttttaaagtgtttttcaagttattttctttctgagcagcacagaatctgacataaggcccacagataggagctggttgctttggtggaggcagaagcaggagaaagagaagagtaggaggttcactctttccttctctccctctttctctcagctagtgtaccctgaggcatctctgctcagcagaaaatagtttgcaaaccacagatgcaagggattcttctgtgttatacttgcgacattggcttccattagacgatcttagtaaatactgttatatggtctctcagtctcactggaaacacatcatttctcagcttgtgactagtttaagaataacagaggcagaattccttaactggtacttgtccttaactattcatgcatagcacagcctctgtttacagaggattcaaaaccttgtgtttgtacttgtacttccaccatctcccaggaccattgggagctgttcctggcccttgtataccaaggtccaggtatggtagaactaaataaacactactgattcttgccacattttttttcatccttagctttgttttttgcctttgttttttaactttctaactctttttctgtctttatttaatgttttttgtttttttttttttccgtgctctccacttgcttccctgatgttttttcccttgcttcttctgggcctcagaaaaggaaggaatatatttatgaccacaaatctcttttccaggaattcatcactgtgcaattcttcactacatctctgataatggacaagtagtcatggggaaaaggccaccagtaaggacaaacacaattgaataaatacaaagcaaatgctgaactgatttgagagaagtgtcccagcagggtgctgcttggggtacacattccacaaactgcattgcaattactctgagaacaccttgcttcttccatctcaaaaaaaatgttaagtattaattaatgagcgattagttcagccttatgagttattgctctaataaaatggctgttgaagcaggaatcatgaccagtttgagtatattatcgctattctaagagacctctttaattcaacaattaagaggcatgaaatgtactttaatagacataattcaatgatataaaattgttcatctggtgtgagccattcatctttgttaatacacctcaggtcctatggaaaatgactcttcaagaggacttacagaggctgtttttttctccctgtcctgcaaactacctgtgctgggaaaatcaatggtttttttatatagtctctgttaccagcttgagaccttgactgcacaataaaagcaagttctggggtagaatcactgtcttatgctctcctgtctattcccataatgcctaagagttctgattaataagtattttaaatcaaattaaaattgaatttcaattgttgaattaagtataaaattagaagaccttcatgtggaattcagtatatttacagaaactgtaaatggtttattgaattatgctttttaccttttgcagtggttctcattttgttaccagcagcaagtctaggaggtttcttcagtcattggttcttgtcttcttggatttgaccaagagacagacgtagatttgaggcagaaacgagaatttattgaagcaaagaaaagtacacttgggcaactaggaaggttgaatgccccccatctttggctcaggaatcttatagatttactatttcctatttatttttcttggtcttctcccttcctccttcccctcgggtgggctgttggctagctgctacatgtgcagtgactcctcagtatctgggaggggccgcatgtgccattgggtagttgaaattaaagacatgctctcttagggaaattttcccttactggtctagcgctcccagaggaaggtcatataccagtcaaactgccattttgtcccttactgtgcatgtctggacacacttgctcaattcctaggatcttatcagaaagtcattgcccagaagctcaagatgtttcctgtttgttaggaaaatttcccctccctgacaccagctgtgaccatcagtcctgaagaggccgcctcacaatggcatgacagtcacctgatggtcacctgacattccttggggtcgtatcctgccctgctcatatctgactatctatctactccaaaactttcatgtgttctaagagagttaatgctttcataacttctttcatagatcctcccactttgcttcccaacactgccaccacccaaccctagccctctcctgcctcactcacctgcatctgagtttctgttattgtgtttgtcatacgtaaattcctggtgaagcttctctttattttggcctcttcttcaagtcctggttttatagttcatgacccatttgaaattgctacaaaattttgatagtttaataaagggttcttatttttttacttgaaagcacattagtttagataactgttttatttgttcttcaagaacttcacattattcttttttttcaatgactattggccaaatcagcaaaattttacgttattctgaatttgaacattaaagggagcagcatgacaagagtagaaattaaaattgattaggaaggaaatattctaggttcctcttcttattctgctgataactcagctctttagataactatggatgagtttctaagcctctcaaaacctcactttacttatccataaattgaagattattatacctcccagggtttctgctaaaatcaaatgggtataattgatgtgaaaatgttttgaaaaataagagttctatactaagccagtttagcaatgtagtcatgcatgagaaagcctcaagggttggcctttctcctgcactgctggtttgtataaaactttcctgagcttccaccttcaactctaattaggtgaatatccattagtgtttcagtcctcagtgtccaaaatccaactcagcattttttttttctgcagaagctgtaactctagttggttcaaaacatggctaatattgttatcatattggtcacgcagacctgaaacatgaaaattattttcaacttggatggccatgccccagtattggtagcattatgctggtttacaacgattcccaaataccacatcagaaatttatattcctagagttctggagtttggagctttggaatctaggtgtcagtgtggttgttccttttggatgtcctaaggcagagtgtatttcatgtttgcctcctggcttctggtggttgcaagcaatctttggcacctgtagacacatcactctaatctctgcttccgtctttacatagtgctcctgttgggtgtctctgtctctttcctttccttataagaacacaaggtcatttggtttggggcccactctaacccagtatgacctcattttaacttgaatacacctacaaatgccctattttcaaataaggtcatattcacaggtagtggggactaggacttgaacatatcttttgggaggatataattttagtcactataccctgaaatattaccaaaagtccacctttaaacttcaaagtgtcctggtttggatgataaatttgattgtcaccaaaaactttgactcttggttctcctctccagcatctcatctttttgccaaaccaggaaggaatggtttcttgcatttcagctatctaaatctgtaaatgcaccatgccccttcatttctgacatctctcactctattattttcctcaacatctgaccctgttagcctacctctactgacctagtctgctatcatcctcaaactgcaacttcagcctctggctatctcctacatgtcaattcctcattcccaaatttaactattaatatgtcagcaatccgtatgccaaatcaccctcttaagtggtctatttgtccatacagatcattatttcaatagggtgaaaacaattcattctttttgtaacatataatttggaattcatgtattttaattaatttatttattttgagacagcatcttgctctgtcacgcaggctggagtacagtggtgtaatcttggctcactgtagcctcacctctgaggttccagcgattctcctgcctcagcttcccaagtagctgggattacaggtgcctgccaccacacccggctagttgtgtagttttagtagagaggggtttcaccatgttggccaggctgatctcgaacctctgacctgaagtgacccacctgcttcggcctcccaaagtgctgggattacaggcatgagccaccgcactcagctacatttatgtattttaatctctttcttctcttatgcggataatgtctaggactataaaatatcttttctgccttttgttcaagactaagtatatactatgtttgttgatattcatccttatgttcatagggctttttaaaaaatccttgaattaagggtagggatgaggaaaaaaaattcacaaaagaagaggaacaatcagctgaagctcagacatttgtattaatacattgttttataagtactgtatgatgtgcttctttgggtaaatatcagaattttgagtaaagggcactcatgattttcttgattctactcttagttttgtaataacttggtgtagattgctttgtgttcgtacaaatcagtgagatcctgtgggagaaaattattttggagcgtgagtgggttttcagccagagactgtgggaggcacacatgacgtctgtctgctttttccttctcataactaaaattgtagtatttttgacagacttaaactctcagggatggtagcaaattaaagtggtttctaaacagccaagtctggcctgaattctgctacacaaatgtgtaacagattaccatcaggcaggacatgaaagttgactgttttaaaaatctacaaaagagaggtgaatttctcccatttagtagctcaaaatgaatgcttgtgagagagccagcaagctcggtgtgaaacctgtaccatttgaacatattaaaaatagaaaaaaatcccggagaaacatcttttcagaacaagtttaggttgggctgtaggattctggcatggttaaaggttaatctttggcattcagagcagagaaatttaatctgtttaagcttcaaaggacagaaaactcaaagattcctatttattccggggtgattttcttttggctctggctaaatcacttggggcaaaggggttttctttaaaaaacaaataaaagtaagaaggaaaaggaagaaagacatagttctggcatagccaggagaaaatgctaataggaagtatggaggcaacccttctctaaagaagaaagtgaaagcagataaatgctaaattggagtttgtctgggacaatagagaaatggaatcatgtttctaggtcttcatttttctagtatacaacaaacacggtacaaaaatttttatcacggtgagcgccagagtgattggacttaagtaaagtttggtatgagaaagacagcaaattgtagtgttggtcttaactatattctaatgtttatatttgtgtatttatacatagtaattagacataattaaaatgtgatgctaattatgttgataaataattatatacttaaaggaaatacaaagttgacaagatggcaggccatcttccttccacttttctcttttattgcctacgaaatactttcaggttggggttggccagtgcagctgtcaggcaccacccttacctttccaggaggtccatccacagagcataaaaggagacaaatgcttgggaggcattcttgtaaatatggatctcagtgcgatagattgcaaatgtcagactgctagattccatcactggattccatcactggattcctaagatcagtgcagagattaaaaaaaatacgtttttttttctcccttaaagaagaacaactttctaattttcagatctttataattaaggaaatttccagaagaagtcataagaaaaggcagcatcaatagcaaatactttcctggaaattgattttaaaacattttttattttccactatttttgtcttctttcattggaatgaggctttaagaaaatgtctctgtgttccagagagatgtgaagcaaatagaaactccgattaaaaagcacagcttcccatctggaggataatgtttgttcaactcagctcaagatcctctaaatttgctagtgatgatgcttcatggaaattgacagctgaggaacccaaagagctgtactcaaataactgcctcctccgtctcttctttcctctctccacgtctggtgcccctaagagcaaatgacaatgtgggggcgggggtgtacatatatctctgaggggcaacttaattagctcccaaataaagaaaaaacttcaggggctgcgaaggcagtgattatgttaacccttggattgataggaaaacaagtgaggttctaaatctcctttttatggatggtgataaaagggtcatcttgtccgtttattaatgaaacaccaagactctccaggcaagattttcatcaggttactcaccaactctgcaatgttcatgggaacagcatccttctcagataaattcctccttttccatgttgaactacagcggtctgatctgaggtgccactcactagccagtcctgtggcctccttcctgtggccctgaaaatctgtatctgtgttctgttctggctgtagagaaaacatcaatatgtttgataagactaacggggatgacttgagtgtgaagatttggtcttgttattccctggcagcaatcagtcaccccagaatattccaaagggactgaaacagtactaactgtgtccattccattttcactgctgttcctttgccaagggagttttcagcaaaaataatcaacagaaagagcgaaaacaagctggacagagcagtcttacttccagttgactgacaacatagctaccctaaaactgacaactgtgtcaagaaaacaattactcaccatgtcatgactcagagtagaattttattgtgcacttgttctgtacctgaaaatttaaatatgtgtctgtctcttctgttggtttcaaaataattgtgcatgttgaccactgctacctttgcgatcacttacttcctgcttttgagtgttgaaatgtttccttttttacaagataatgtttatagtagatgacttttttggttttatgcttactttaggtaaaattaaaaagttgatgaccacatattagtctccaaattaaaaaaacaacaacatactagacagtgaaattcaaacgttttagaatctctagaaaaaaatgcccaccttattaatttagtcatcaaatatttattgagtatccacttatatgtggcttttctaaggcagcacccatccaggagaaatacaatgtgagctataaatgtgagtcacccatataattttaaattttctagtagccacactaaagaaaaggtaacaagaaataagtgctggattttaatataatatatataaacttttattgtaagttcgggggtacaagtgcatgtttgttacataggtaaacttgtgtcatggaggtttgttgtaccgattatttcatcaaccaggtattaagcatagcaccccttaggtatttttcctgatcctctccctcctcccaccctccactctccaataggccccagtgtgtgttgttcctctctatgtgtccatgtgttctcatcacttagctcccacttattaagtgagagcatgcagtaattggttttctgttcctgtgttagttttgtaaggataatgttctctagctccacccatgttcctgcaaaggataagatttcattctttttatgactgcatagtattccatggtgtatatgatggcagcggtgggcgtccagagtggctgctgccaccgtactggctgcagcagggaggtgtgagcagtggcggcaggagcggctgcgggagcagcagtggaagcgatgggtcccctgtgccttgcatccccaaggcagctgactacaccgccatcaccctcacacagccaggttggatctgccaccagacctggagcctctgccgctccagaccctggctccctgtcaccactgtcacccgctgctgctgtggggaaggtgcagggtggaaggcaaagctgggtccctgacgctgccatgctccatggagcaggtgggagccagggacaagtgggaaccctcccagagcccgccgtcatggtggccaccatgatggagcccagccgagccatcagccagttggggagcagtgcggtcaggtatgggcgggcagagagggaccaagcgaggacctggagcccttaccccaggctgcaaggaagcacagccagggctgcctgtacattccatggagcgggcaggtgccccaccctcccaggtgcaggacctggatgtctctgcattatgcacccttgggggcccaggaaatcccccactacccctgcaggcttgagggtgtctgctcctgctgcctggcctcttcctgctcctggcgctcgcttcaatcttggagcagggttagggccaagcccaggtgctgtcacaggctggctgggtttgcccatgctcatggcagcgctgacacaccaaccccctgccgcctcggccccctccagactttggttgctgacgagtgccgggggaaagccaaggtgggactgagggcagctacctgctggcttgcaggtgacccttggcgctagcagcctgggcgccacggacagcggcaggaggcaggaaaactcctgggtggaaggggacgggtccccggtgagcccccaccttcaagccagggagggcctgaaggctgggggccaggctgcctgtcccgcagactagagtgggaacttgtggtgccttttccggtcgcccgtggccgcccatggaccaatcctcacacatgtcctcccctctgaccaatcctcccctctgaccaatcccgcccatggacaaatcctcacacacgtcctccccataaaaagcccagggctcagccagagctgagcagatgatggaatgactagccgcagagcaggagctaccctctctgctaggtgctaaacacttgttgggacaagctgcctgcagagaggaactaccctctctactaggagctgaacatttgatgggacaccctggctgcagaaaggagctgcaccctgcgggtctcctctgagttgttctattgctaaacaaagctcctcttcatcttgctcacccatcacttgtatgcatacctcattctgcctggttgcagggcaagaactccggacccactgaatggcgaggctgaaagaggtgtaacacgaacagggctgagtcgtgctcgttgctcactacattgcaggtaaagagaaggagagaagctctgcggccctttggggaacctggacctgcgaactccctgagccagggctgtgactccctctttggggccctatggttcctggcgtctccaagcttccgtgtgccacacattccccggtgccagccgtgaaagctgcttgcagtgtgcctggtccagccgcagcctcgcagagagctggggcctgtgccagcacctggagctgcctgacccactgcagcagccagcatgtctgactgtgtgcagtggccggaccccacacttgctaacacaccgctcaccgctcctcacctgactcacccttggcaggtgtggatccaggcccttggcaggcatgggatctaggccagtagcatgagccaagcacagccttccaggccaggtgggctcgagcaaaactcaggcaaaggaaccaccggccacagaggcttccagccagaaaagtgacacctcaaggatcccgtaacatatatgtaccacattttctttatccagtctattattgatgggcatttaggttgattccatacctttgctattgtgaatagtgctgcaatgaacatatgtgtgtgtgtgtctttataatagaatgctttatattcctttgggtgtatacccagtaatggaattgctgggttaaatggtatttctgtcctcagatctttgagggatcaccacagtctttcacaaatgggtgaactaatttacactcctatcaacagtgtataaatgttccttttcctccataaactcactcactagcatctgttttttttttttttactttttagcaataaccattctgactgatgtgagatgagatctcattgtggttttgatttgcattaccctaatgatcagtgatgttgagctgttttttcatatgattgttgtgaagataattcctaaacacatgtgggggatggcttgctgtgtgggggatggcttgctgttagctgatcaaaactgggtgacctggctatgctccacatcttccatccttcagccaactaacccagatgtccatggcaatgatggagctgcaagaaagagcaagctccaatatacaagcccatttcagtcttctgcttgcatcgtgtatgtcaacatcctattgggcaaaccaagtcacatggctgagcccagagtcaagaggcagagcaggtgtctcacagtaagtattaataatagcaagtaataggttgtcacctaaacttctggcggactggttgtgacttggtttccacaaccccctgctcaggcttgattaatttgctatagtgacttactgaactcagggaaacattttacttaagtttacccatttattaataaagggtataataaacaatacagatgaacagccagaaggaagagatatatagggtgaggttatgtgggaagaggcacagagcttccctgccctccctgggcacaccactgtccaagaatctccatgtgctcggctatccagaagttccccaacatcagtccttttgggtttttatgaaagcttcattatctatgcatgactgattaacttaatggccattggtgataaacccaaacttcacctcccctcccagaagtctcaaccctctaatttggcctaggtctttctggtgaacagcccccatcctaaagctatctcggggtccccagccaccagtcttttcattatcatataaaagacactcttatcactagagattccaagcgttttggtagctctacaccaggaaaggtggactaacacatatatgtatgtatatatgtgtgtacatgtatatgtatatataactgaaaattacagtattataagtggcctcacctcaatctttgccttggggacacagggatccctctgcttattcttggttcattctctagctacctctctccctcagcctggacagtagctgcattttgtgcttgtactattggattacatttcctgaaattattgtctcaggactgcttttggaggaacccagtataaaacagtataataacccaagctcactggagttatatattttaggtcatagagtgattcacctcatctacaacctatacatcatgagttgtaatactgacttgtctgttgcaatctgaagcaaataaataattgttttaaaaattcttactatgcttcgaagctgtgaaagcatgttgctaaaacatctgtttaatttatttacttcagtccaataatcagtcagttcagccagaaatatatttgcttgtataaactgaacactcaggggacccttgaaactgtccatattttagttacttagtttggtattgttggtacacatctgccatctcaaccacctccacaataaactgaaataatcataccactgtgctctccatgctgttgtgaggataattcctaaatattgctgtgagactcatggcacatatgaaatttttaaataacaaacatgaaatgctttatttaagggtacccccaagaaaacagattgaggtgaattcatgttttgaatttatcatcattttaattattattctcctgtacactgctggttaaaaatgcctttcatacaataggtttctcagctttattctaagcattaactgtacctgataatggttttgctcatgaagttctgataacacagaaatgacaaatcaatataagcccagaatgactaatgggctagagtacaaagataacccagtacttttctctccttgttcccattcctttgccatatgactttgtaatataatttcccattgtgggaaacctgctctgccccttgactctaggctcagccatgtaacttggtttgcccaacaggatgttggcatacacgatgcaagcagaggcatgaaatggtcttgttctctcttgtagctctatcattgccatagacagctggattagtttgctggagaatggcaaatgtggaacatacccaggtcacctagttttgatgagctaacagcaagccatcctctacacagcaagccatcccccacacatgtttagagccaagctgagagcagaagaacaacccagctgagcccagcacaaattctcaactctcagattcaaggactaaacatatgcttattattttaagtgacagagctttgaggaggtatgttaggtagtgctgttactacttctaatatggtcaaattcatgagatacttctgctatggcattgactaatctagtttcctacctcatttcctctgtgttgatggtagtctcagactttctgacactatcttactgactgattgccaagattttcttcctgactcaagaattctaaggcttttcaacatttttcttctcttgacttcatctctctttctatcctgctaggagtcagactctgtctttgccattaactgaatatggaagcaaatggttccatcaatttttttttttttttttttgagatggagtctcactctgtcgcccaggctggagtgcagtggcacgatctcggctcactgcaacctccacctcccaggttcaaggttcaagtgattctcctgcctcagccttctgagtaggtgggattacagacactcaccaccatgcctggctaatttttgtatttttagtagagatgggtttcaccatgttggtcaggctggtcttgaactcctgacctcatgatccacctgcctcagcctcccaaagtgctgggattacaggtgtgagccaccacacctggctggttcaatcttatgatccctcagtaagttttctgcctccttttaccctgtataactatagtttattatgacacagccagcagcaacaaaagtattttattactgtgacagacagtttgaaataaatttcttttgacattctccaagccagtgtgggagctggagaaacacacattgggtgggaagaagctgattgaaaggggtattttcaatatatttttgcacaaagggatgcatctatagtttttgtggcacttgacacttgagtctaaactgcaatagctgtttttccccaaaactgtgtcaatactatatgccaaagaagactttcttatttccattaacgcatttactcagaaagcgcatacatagtgggattctctttgtgaggcctatttgtgccctgtagcactttccagtatgttcttttgcttcctttgtctcctccatcaaggctccaaagtaaccctaaaagtattgggacttagtgaagacttactccctacttccctagtgaaatcttcactaagtctcttcgctttcatgaaatcttttctggtttacattcagattcttgcctctgtttttatcctgggaaagagaagtttcataacttctgggatgaatactaaagtttcataactgggatgaatactaaagctccaatatttaatattacttgagggctcccagagtatctggtactatctcactgcctcctgagtttggttttggggaggattcctgaacattagccaagacacaacagtatatacaacaggagtgtatatgaaggggatcccagagatgagaccaacatctttctcgagcctcctcaaacttgaaattactctgaggaggcttggagtgaaagaaaaaggacatggaggtagccgctcaacttctaacaatatttgtttgcgagcaagcatggggcacatccagaaatatgtatggggcttgttctatgcagggcttgctatattagacaggatgagagccagtgaagtaaatactattcctggttctaaaggaaagtatgagttatatgtgaataaaaagtcctggactggaaattcaaccttttcaagcttctttagttttcaatagtattactttctcaaatatttcatttgccttcatttaattgcaaatactttgtattatgcataagagaaccaagagacagtgtgggccataaaatattcattgcagattttaattttgattctggagtcaaataataaaatggaaataaggggaaaatattccaaaatgagtcacaagatccacaaaggtctgaagaaagtgatcttaccactcaaattgtattagaatatacataagctaatgaatcatatatcaatgctactttttggagtactaacagatggcacttctactggaggaaagtgaaatactcatccctgtagaaatccacttgggtgcaagcaagtggcacagagtccattggcactcaggcagctagttttgcacctctgtgttcagtgctgtgaactggcctctccataaaagtccatcccaatctctgcacaatgcaaacacataatcatatgataaaaataagatgtaggagtggattgttgcaaagaagctattatatccagactcaaagagaagaaactgtaaaagcaatgcaactatactaaaagcatttgctcctttatgaggaagaaaagttacatttggttatattgaacccatttgcataggaaagggatagatattattggaagtgaaagtggagagagactgagctacatgctcatggcctagatgcaatggtagttgacttggtaggggttacatggggctctacacaactttctatagacactctaggtgccacgcctacatcttgttaatcctctttaccattcctttactgctacttttgcttctgtttgattttgcttttaatgtcctttaccttgacactgtcaaggagtgtctatttttggaggcctgtcattgtgctactggagccaatttgcccacatgtgtggattttgaagtgctctgggtttgagaccctttgggatggcccttagccaaagttgatgagtatggagatatgagagcctagctcccttgcctcctgtcagtacaaactctgagatgtaatttatgctctagagctctcctgcaggatgagcagaggctgggatcctccctagaattgtacccttgctaaatgacttccccttctcttgtcttgcttctccattccctcactggtatctcctggggcacttccttaataaattcctgatgaattcctgttcaggattagctcctcaagactcagtctaagatactctccaatagatagtttaatctatccacatcctcagcagagcttctctgctcagcattggtgaccagcttcagattgtaaacactcttacagatagtgcccacaaacattccctcagaacactcaaggaaggtgtagatagcaacagtattctgaactcttttgtatccgaaaaaacaactggaatgataataagccacaatcttccaatgacagcaataaaaagcaacctttttactttaataaatacatttagggagacagacaaattggctcttttgataaacaagataataattctatttcttctcagtcaacagaagttaatagctttcctactgaaacctatttaagttgacaataagttggaaactaacctgagtttgtgaaaaaggtgtcataattaacttactcagaacgtttcttgatgtattgattaccatttatcatgggcggaggacatttgccctgaaaattgggaggtaccaggtggcgaatttacacaaacacagtgaagagatctggattctcctgatctagagctcagagacatggttgatgttaggagaaaattcaatccttacgtccctctcttttttcttttcttttcttttgtttcccctctctccctctctccctccctccttccctccttctctccttccttccttcctccctctcttccttcattccttccctcctccctcccttccctcctgcttttctcccttcctccctcccttccttccctccttctttccctactccctccctccctctcttccttccttcctcccttcttttcttctttccctcctccctccctcccttccttctttccttccttccttccttgcccccccttttccttccttcctcccttccttcctcccttcttcctccctccccacttcttacttccctacctcccttcttcctttctttcctcccttcttcctttccttcctccctcctttctttcctccttccctccttccttcccttactccctgcttccttccttccctccctccctccttccttccttccctccctcccttcttcctccctcccttcctgcctttctctgtttctttctatagcggaaaccactcagactgcatcatcctctccctctgactctccacaatcacgaatggcaaatagcagttgcaggaaagcagcgccaagagccagcttcacactcaggagagaaccctgtgcctcttcctcatgtttctggtgctctacacattcagaggaacttccctagtgacaaactatagaaatgatccctgaaaatataatcttcattttacatttcttaatgcaggggtccccaacccgaggaaacagtccacacagtaagccccacagaaacagggggcaagccagcattaccgcctcagctccacttcctgtcagatcagctgggcattagattttcatagaagcaggaaccctattgtgaactgcacatgcgagggatctaggttgcctgattcttatgaaaatctaatgcctgatgacccgaggtggaacagtttcatcccaaaacctttcccccacccccactccgtggaaaaattgtcttccacgaaactggtccctggtaccaaaaaggttggggacgctgccttaataaaagtttttttaatctgactggccccagtcaaatttacattctgtgagaatgtaaatagacttcacatgaggaaacagttctgtttatttaatctgcaggacttctcagaacctttattttgctgatgtatggtgcaagtctctcaatgctacattttccaaacttagtggttgtaacatcttttttttcacaacatctctgctgctgtagacaagattgtaaactagtcagatttctctttgccttcctccactttatttctttatctcccctttgattccttacctgaatcatcttgtatgaaaataagtatgagaaatataggtgtctattaattaatatcttattcatctattattgtgaactcaggcatctgctctatagaaactcagaatgtatttcttgggaggaatgcagtcgattgcactccaaaatggcctatgcttctttgttcttccatgcatgtctatctctgtctccaactagatcagaagaccctggagaactgagtagaagttaaaatgttttgaatgaaattaaacactgatattaatattcaattagttcaattaacgttataggtctaaaacttaccaagcattcccaccaaaaagaaaatttgtcaataactttgggaaatagtcttaaaatataagattttagcatttgctgtttagtgtccgtgggacaatcctcctagagagcgcttatcactacatcatatatgtatgtgttgatctctctctctcttctctttctctctctctctctttatctacaggcataccccattttattggtgctttgatttattgtacttcaccagtattagttttttttttttaaacaaattaatggtttgtggcaaccctacttgagcaaatctatcggcaccactttcccaaaagcatgtactcacatcatgtctctgtagctctctcgatttcaaactttttcattacgattatatctttgatggtgatctgtgatcggtgatctttgatgttactattgtaattgttttggggtgtcacaaactgtgcccatataagaaggtgtactgaattgataaatgttcatgttctgattgctccaccgactggctgtttccccatctctcttgctttccttaggcttcactattttctgagacactacaatattgaaattaggccaattaataaacctactatggcttctaagtattcaagtgaaagaaagagtcacatgtctgtcactttcaatcaaaagctaggaatgatttagctcagtaaagaaggcatgttgaaagctgaaacaggctgggcctcttgtgccaaatagttaaccaaattgtgaatgtaaacaagaagctcttgaaggagatttaaagtgcttctccagttaacatatgaataataagaaagccaaacagtcttattcctgatatggagaaagttttagtggtctggatagaagatcaaacagctagaacattcccttaaaccaaagtctaatccagagcaaggccctaaatctcttcaattccagaaaaactgagagaggtgaggcagctgcagaagaaaactctggagatagtagaggttagttcctgaagtttaagaaaataagccatcttcataatataaaagtgcaaagtgaagcagcaagtgctgatcagaagctgcagcaagttatccagatcttgctaagatcattgaagaaagtggctacaataaataaaagatgttcagtgtagatctaatagccttctgttggaaggagatgtcatctaggacttccataggtggagtggagaagtcaatggccagctttatagcttcaaaggacaggctagctctcttgttagaagctaatgcagctggtaactttaagcttaagccaatgctcctttactgttccaaaattctagggctcttaagaattaggctaaatctactctgtctatgctctatagatgaaacaacaaagtctggatgacaacacatctgtttgcagaatggtttactgaatgttttaagcccactgttgagaatttctgcttagaaaaaatggttcctttcaaactattactgctcattgacaatgcatgtggtcacccaagagctctgccgaagatgtacaaggagataaatactgttttcatgcctgctaacacaacatccattctgcagcccatggatcaagaactaattttgactttcaagccttacttaagaaatacatttaataaggctatagctgccatagacagcaattcctctgatggatctgggcaaagtaaacaaaacctttctggaaagaattcaccagtcttgatgaaattaagaatatttgtggttcatgggaggaggccaaaatatcaatattaacaggaatttggaagaatgagattacaagcctcatggaggactttcagggattcaagatttcggtggagacagtcactgtagttgtgaaaatacaaaagagctagacttagaagtggagcctaaagatgttactaaattgctgcaatctcattataaaacttaacaactgaagacttgcttctcatggataagccaagaaagtggtttcttgagatagaatcaacttctggtgaagatgctatgaacattgttcaaatgacagcaaaggatttagaatatgaaataaacgttgttaataaagcagcagcgcagtttaggaggattgactctaggtttgaaagttcttctgtgggtacaatgctatcagacaacattttatgctatagagaaatctttcacaaaaggaaaaatacatcaatgtggcaaacttcatttttgtcttattttaaaaatttcccacagccaccccaggcttcaacaaccacagcccttatcagcctgtggttatcaacactgaggcaagaccctttataagcaaagagataatggagataatgaaggctcagatgatttttttaagcagtaaactatttttaattgaggtatatgcattgttatttagacataatgctattgcacattattagaatacggtatagtataaacataacttttaaatgccctgggaaactaaaaccttatgtgacatgttttattgcaatatttgcttgattgcagtggtctggaactggacctgcacgatcccttaggtgtggctgtatactgtatatcaattatttcttccctctagaatgtaggctccaaagattaaaggcttcattttgcttgctgccatatcctcagtaccaggcacatatcagatgctttgatgtgtaccattgaaaagaaggaaggaagaaagaaaggaagggagggaaggagagagggaaggagggaagaaggcaggaatccagtgtatacacatgctcatggtacttttttgctttttgccagagtgtagctgctaccttacactcatatataaaacacaaggaggtcattaaatagtgtcataagtggtcttcaggaactgagtggtttgggggttaggataattctcttggaagaataatgataaggcactaagtatgtgttggaagctgtggtgaatatttattttggccagctcagttgaaacatatttattaaaacagagtttcattgatactaattctattcaacatggaagcaaacaggataataagagatgagttaggttctagtttggggaaccagaggactgggacttggggtggggggctgactggtggcagtagaggggaaatgttattatcgggaagaagtttcaagatgttccaggcatttacaacattcttatttcccaaaatacccagaaaatcaggtcaagtaagacattctggcccttccttcctataagaacatacttcttactttttaaagaaagtctgtgaaaagcaaaaaagggacctttttaccagagctgactgtaatgtcagctacttgcggaatgtgacaactgcttgtcattctcaatgtccgatcaccagaaggtttctccccaatcatggattcatgtaagaacttggctctaaatgtttccaacactaaaattgtcttttccaataattcattttttttattgagtacactaatcttcctttcttcgaacttagaagactcttctttgacctttgcctcccttcattgctatgctcagcctacagtcacatcctaataatttcttcctcattatgcctcttctttcacctcaaatgacttaaccccatcattcaagggcaggtccccatcactggtcatctagatagctctgacaacctgctagctgtctccagcctaagtgaggatactgtatcctcagtaccaggcacatatcaggttgcaaacccagatttctttgggggactctcagtagagagaaaactatagagatatagagggctccattataagtaaaatcagctgggaataaatgttttcaatgtagcttactcaggagaccctttgtttttctcaaggagcactcagagttttcattacgtagttattgtaccagggtgctcagtgaggaagaattcaacacagaaattttttcagatatatatatatatatatatatatatatatatatatatatatatatacacacatgtaggcagaaacatggggtcacctgagaaaatattattttctgttctgctgtatacttatggaaatctggcacccttatactggaaaaaagctgtatggtacattgtattttttgtttacaattccatctctccatggccttggtatgtcttccttatgggagcactttgcttccaacccttttgatgtggggtttgaccatgtgactgtctataatgacagctctgcatagaggcttcaaaagacctgccatgttgcagcttgccttcttgagtccaccatgagaagaggatgccccacacagctatggctcattcaactcattcccagagtgaaaatatgaggagcaaacctgaaactgacacaagcctagagtccagcccagcccagccgattgacctacggctgatccatggacctataaacaaatgaacatgtatttcagatcactgtgttataggtatgtgtgttacggaaaatcatggcagaacgcatgaatacaggttataaggggaatatgtgccgctttatgtgcggggccaacctaacgctgctttgcccttaaaaaggacttttctgcccctcattttagttttcaccccactgttattattattatcttgagatggagtcttgctgtgtcacccaggctggagtgcagtggctcgatctcggctcactgcaacctccgcctcccgggttcaagtgattctcctgcctcagcctcccaagtagctgggattacagatgtgcataaccatacctggctaacttttgtattttcagtagcgactgagtttcactatgttggccaggctggtcttgaactcctgacctcaggtgatccgcctgcctcggcctcccaaagtgctgagccaccatgcccggcctcatcccacagttctgatttctgctctttgctcttgtgttatactaacatcacatggagcactgtaagcgatctgcaaaatgatcagagttataccaaagagttggattgggaataaaataggttaatcctggacagaagagaaattctgtcacaggtgaggacattgatcacattttttaagtgggttaggtgagaaataaatttaaatcatccaattgacaatggctatcactggcagaaattatcaatacaaaatcaacttgacagtggtggcaacttcacattataacatttgctctacaggaaaaactaaaaaaaaatataaaggaagtcttattcctattagatttaataggaataatcagtagaaaataagacaatgacaaatggaataaaaattgacccaagaatcaaatcatctcaaggaatactaatgtgaaatgacagccttggaaaaattggacttgctatgaataaggaccgcaggaacaatgagaacacatggacacaggaagggtaacattacacaccggggactgttgtggggttgggggagaggggagggatagcattaggagatatacctaatgctaaatgacaagttaatgagtgcagcacaccaacatggcacatgtatacatatgtaacaaacctgcacgttgtgcacatgtaccctaaaacttaaagtataatgataataaaatttaaaaaaaaaaaaggaagatactctcaatagggaaactgtgatttgaggatctagaccaccatggcacattcctgcagtgttttccctgtggattccatgtccccttggccatcagcatgtgtgctgtggacctgatccccacctccagcctggctgcctccttggagtggagaaagttctctgaggtggccaagagaggaaatgggacaacactgatgtctccagcaagtgcagcacccaccagtgggccccggctgccagtgctctcctggtatagctttggatcttgtatccagggtgagtccatgcatccagttcaaagggctaccctctcccttccaggtaggtttcatttcatgaggccacacttcagagtgtggtgaaggcaaagcatccgtgtgctttctatgtccagctccatcagtgggatttcctcaaattctggcattttattgacagaggttacctcctgaaaaggtgttaccattttatatcagagctttctgaaacagtgcaattactctttgtaaggaactgttgccttgtctggcatatatgttagcatgcatgtgtgtgtgaaagcacatgaactctttatgtgtgtgtatgtcagcatgtggatgtgtgtatttatctgtgtgcatttatgtgtgaatgtaggtgcatttgagggtgtatgagtgtgtgaatatgattatgattttcagtgtttgccggtgagtgtgtgtaggagtgtatatacttatgcatgagtgtttccatattgtatgtatatgtatgtgtgagtatactgggtgtgtgtgtatatgtgtgtttttgtgcattctgatgagaactttttcaattagaatacacactacttgttttggtcattaatatcatttattgtattcatcttttggggagtttagcactttttgttttattttttattttatttcatttatttatttattgagacagagtcttgctctgttgcctaggtgaagtgggtgtgatctcggctcactgcaacctctgcctcccgggttccagtgattctcccacctcagcctcctgagtagctgggattaaaggcacccaccatcatgcccggctaatttttgtatttttgtagagatggggtttcaccatgttggccaggctggtcttgaactcctggtctcaggtcatccacctgcctcagccttcccaagtgctgggattacaggcgtaagctaccgcgcccagttggcactttttgttttaatcataccccaccactttcttcaatgagcatccctattttttctctactggattcttttttcttaaatgtttttaatatctttgaaatctctcaacaatttgtttcccttctaaatatttccactacttttcaaaatttcccttattaatcctcttgtattctataaattttactggctcactttcctttcagagaattaaagctgattagactttaggaactgggagaaaagtgggggatatttgttcacttgttcatttagtaaatattaatggagcaactgccaaatgagatgtactgttttaaacactacaactatagttgtaaataagattcacctttctgagacttacattttaaggccattccaagcagagggaacagcatgtgcaaagatacagttgtctgcccagtaaaggcctggttaccaagctaagggattgtgtcacactgtcattttgctgcattgtattggttatgcatgtcacaggcacagaccaggtacaagaggagagaacacacaaaagcaggaataccacgaggtgcagttcgttgtggacaccaatgtgacagacatttgctcataccatgcaccagacaaatatgctaagttgtgaggtacgcctgcccttcaagagactgaaggatcctgagggactgagggatcgagaggggaattcattccaatgtcgcaccaggaactaagtgaagatgtctggtgagcagtgacatgcatgctacagaagcattcgggaaagatcagtactgacaagaaggggcctgttggtccataaaaagctgctgaagtcacagattgaccatggttgttccaggagtgagaggaggatggaagatcaaagcctaagaaacacagacatttaaagaacagactattccacaaagaccatgaagcagagttgcgggattaaaaaccaagagaggagaatggataaatacattgtaggtgttaaaaattgagaaatagaaattacacacacacacacacacacacacacgtagtatacgacatcatgctctgaaatatgcatacattgtggaaggtatcagttgagctaattaacatatgcattacctcaactacttatttttttgtggtgagaacacttaaaactcactctcttttaaattttaaaaacacaatacagtgttatttatgacagccaccatgttgtaccacagatctcttgaacgtattcctccatctaactaaatgtttttctcctcggccctccccactaaccccagcctctggtaaccgacattctactctccacttccatgggataaacttttttagattatacatataagtgagaccatgtggtatttgtctttctgtgcctaacttatttcacttaacataaagtcctccagatttatccacattgtggcaaatgacagaattttcttctttgctaaggcttaatattatagtattctactgtgtacatctaccacattttatttttccattcatccatcaacggacacttaggttgattccttgtcttagctattgtgagtaatgctgcaatgaacatgggagagtacagatatctctttaacatattgatttcattttctttggatatatacccagtagtagaatttctaggtaataggccagttatatttttaatttttaaaggacctctgtactatcttccataatggctatccaaatttacattcccactaacagtgtatgagttctcttttctccacatcttccccaacacttgttatcttcttattttttaaaaaataatagccatcctgagactttgctgaagttgcttatcagcttaaggagattttgggctgagacaatggggttttctagatatacaatcatgtcatctgcaaacagggacaatttgacttcctcttttcctaattgaataccctttatttccttctccagcctaattgccctggccagaacttccaacactatgttgaataggagtggtgagagagggcatccctgtcttgtgccagttttcaaagggaattcttctagtttttgcccattcagtatgatattggcagtgggtttgtcatagattagctcttattattttgagatacgtcccatcaatacctaatttatggagagtttttagcatgaagggctgttgaattttgtcaaagactcccatttacaattgcttcaaagagaataaaatacctaggaatccaacttacaacggatgtgaaggacctcttcaaggagaactacaaaccactgctcaatgaaataaaagaggatacaaagaaatggaagaacattccatgctcatgggtaggaagaatcaatattctgaaaatggccatactgccccaggtaatttatagattcaatgccatccccatcaagctaccaatgactttcttcacagaatgggaaaaaactactttaaagttcatatggaaccaaaaaagagcccacatctccaagtcaatcctaagccaaaagaacaaagctggaggcatcacactacctgacttcaaactatactacaaggctacagtaaccaaaacagcatggtactggtaccaaaacagagttatagatcaatggaacagaacagagccctcagaaataatgctgcatatctacaactatctgatctttgacaaacctgagaaaaacaagaaatggggaaaggattccctatttaataaatggtgctgggaaaactggctagccatatgtagaaagctgaaactggatcccttccttacaccttatacaaaaattaattcaagatggattaaagacttaaatgttagacctaaaaccataaaaaccctagaagaaaacctaggcattaccattcaggacataggcatgggcaaggacttcatgcctaaaacaccaaaagcaatggcaacaaaagccaaaattgacaaatgggatctaattaaactaaagagcttctgcacagcaaaagaaactaccatcagagtgaacaggcaacctacaaaatgggagaaaattttcgcaacctactcatctgacaaagggctaatatccagaatctacaatgaactcaaacaaatttacaagaaaaaacaaacaaccccatcaaaaggtgggcaaaggacatgaacagacacgtctcaaaagaagacatttatgcagccaaaaaacacatgaaaaaatgctcaccatcactggccatcagagaaatgcaaatcaaaaccacaatgagataccatctcacaccagttagaatggcgataattaaaaagtcaggaaacaacaggtgctggagaggatgtggagaaataggaacacttttacactgttggtgggactgtaaactagttcaaccattgtggaagtcagtgtggcgattcctcagggatctagaactagaaataccatttgacccagccatcccattattgggtatatacccaaaggactataaatcatgctgctataaagacacatgcacacgtatgtttattgcggcactattcacaatagcaaagacttggaaccaacccaaatgtccaacaatgatagactggattaagaaaatgtggcacatatacaccatggaatactatgcagccataaaaaatgatgagttcatgtcctttgtagggacatggatgaaattggaaatcatcattctcagtaaactatcgcaaggacaaaaaaccaaacaccgcatgttctcactcataggtgggaattgaacaatgagaacacatggacacaggaaggggaacctcacactctggggactgttgtggggtgaggggaggggggagggatagcattaggcgatatacctaatgctaaatgatgagttaatggatgcagcacaccagcatggcacatgtatacatatgtaactaacctgcacattgtgcacatgtaccctaaaacttaaagtataataacaataaaataaaaaataaaaaaataaaaaataaaaaataatagccatcctaacatgtgtgaggtgatagctcattgtggttttaatttgcatttcctggcagtgctactgaacactttttaaaacataccagttgaacatctgtatgttttcttttgaaaagtgtctcttcaggtcctctgcccatttttaaattgggttatttgttttattgctattgagttatttgagttcttatatattttgtatattaaccccttatcagatgcatggtttacaaatgttttctcctattccataggttatctctttactctgcttattatttccttagctgtgcaaaagctttttagtttggtgcaatttaatttgcctattttttgctttcattgcctgtgcttttgggttgacattcaaaagtcattgcacagataaatgtcatggagatttccccctatgttttcttgtagtagttttatattttatactccctcacgaatgggattaatgcccttataaaaaaggcttcagagagctgtctggctctgccatcttttctgccatgtgaggacacagaattcagccctttttacccttcccttcatgaatcttgctgtctcacccaggttgaagtgcagtggcatgatcatagctcactgtagcctcaacctctcgggctcaagcaatcatcctgcctcagcctaccaaatagctaggacagtagacacaggtgtgcaccagcatgcctagctaatttttaaaatttttttgtagagatggggtcttgctattttgcccaggctggtttcaaactgttggcttcaagctattctcctgcctcagcctcccaaagtgctgggattaaaggtgggggccaccatgcccagccaaatttaccttctttgaaatatttctttacccagtgtcaggtattacgttatagcaaccagaacagactgagacaaagtcggtgctcacgtccctcccatccccatgcttaggggatctctctctcaggcagtgctgcttggggttagcggaggggtgatgcagataatgtgaaactgttctttctatcctcttcaatgcatcttttcttatttctgtgctatactcaggtgttgtaatctctcatctggtttccctggctcttgtgaaggtattttaatgaatggattgttgtttaaattgatgtttctacggagggtggctgctggaatgtcctattctgccatcttgctgatgtcagcctcaataaattgtagttattcaagaatggaatactactcagcaacaaatgatctactgatacacacagcaacatggaggaacctctagaatgagcacatttaatctaggtgggtttctgtcagaatagtaattgtttttatggggtcgaggggggaattttcttgaggaaggagcacagctaacttctggagggaaggaaatgttttgtatcttgatttgagtggtgattacaggagtgtatatatttgtcaaaaaatcaaactatacatttaaaatctatgcattcatattatacaaatgataccttaataaaacaacacaaaacatgaaacaaaaacaatatatactatactgcctctattgagagatgttttagcaatctccaggttttcacaaccaaaaatgaccctgaagtaaagaaacacttgggcaagagcacttatttgcctccctaagtatttcctaaagatagatccatagatgggagactaaatgttccaaattcatgagcacttttaaagatcttgatcttatttgcttttagcggatttgttaatacctaccccatcctctttccttccctccatctctcttcctttcctctttcctgccctctagcttcttcttcctcccactcctcatgtatataatatacattatatacatatatgtcttttttgatggatcaccctttgcaatagcattattttcttttggtttgtgtttctttgtaacaacaccacactgctttaaatactattggtttctggaaagctttgatacctgtaacaccttttaaatcagatcaaagtatcatattacactactgaagagaccattcgaagtcttgattgctattttttaaaaatggaagtataataaggtttgtgaatagccctaaaattgtgcttaaggtttgcctgaagcttacaaatttcgaaatgcttccaaagatgttaaataattgcacaagtgtagtggaacattatttaagcctaagtccttccagcaccagcatgtgaaatgtgcattttccatctcacttggtccatgcgacttagagtgcattccatgagccagtaatgttggcatcacctggaagcttgttagaaatgcagaatctcacactgtacccagacttactgaatcaagctggcatttttacaagattccaagatgatgcatataagtagtaaaattcaatacttaaagccctctgtggttgccaattctgtgtgcattaaaaacctctggagatatttccaaaatgtagaacagggataaagtgtggatttttggtgaggccaggcaggtagataggattccactatgaccagggagaaagtccacacacagggaagagctgaggatgtctagatgctaaatgtagtatagtacctagtaataactaatacagtagtccaaagaagcagggaagattccaacctagaacccatgatcaagtcagaaggagggaatatgacccaagagaagcgattatggggagggaaattgccttctgaatatctatccattttctggttgtttgtggttgctaacgagattgaaacattctcctctgagttctgcacaatcaagcagcctgcatgagactggatccttatcataaaaaatctccatattttcctttccaccttgcatccttcattcacaggtaatccttgcaaattctaactcatctaaaagataaattcccaatgaaaggaattaggacagcatagttagtcttcctatattatagatgtgaaaacaaaaacaccagaattttattagcttcctaattttaatagaaaactaggctataaggttgaccctagtttctgaatttattgatcaaaattccaggtacttacggtgagtatacactagcaatcttttttgaagtttagagtttatatcaaaccaatattcctacagcctctcatcaccaagtaaccttcaaaagtgctgttcaaaataacaatattagttgggttgttttgggcacattgcattgaatataattttgatggcataatactgcaccaagtaaatggcacaactgaattaaaataataagctgtgagtgtgaattgtgtttggcaatggtaagctataacagctcatgtgttgatatatcattagtttaaaatgattaattttgcattccctaaggtaaaatggcaaaatgatgctgtatacaaactctttattttttacacctacagtttgtacaaagattgaaaatatcaagacaggtgaccagcagaagttcaatgagaaaacaggacaaaactttacactctattatttgaaaaatggcaatgctagaagtgattgctagaatactagaatggcaatgctagatcccgccatagcctagtgctcctaacccaccccaaaacatggtggaggaatgaagttttgtgggaaaaaaatatttagaaatgtgctcaaattttgagaagactgaataagaaagatgtgtaggtagtccagaaataaatgaaacatctgtgaaaataaatgctccatccacccactttgaggtctctacagagacaaaaaaaaatctatcaatctttgccattttgtttctctcctgctgggaggaaaggagaaataggagcctaaattaccctaaactgattatttccaaatgtgaataggaagctagcagggtagaaaactaaaggggaaataaatatgccagaggtgggtaatcagaactctgggacaactttccttcacactctggaaaactcacagttctcacctgtactttccctacatatgttggaaggatgtgaaatggacttagagagaagcgagggatactggggaagggaacaactgcagctctttgatgaaagcgaaggccctgaggcctggtttgaattgggaaagggatctgaactgtgcagctatctatatatatctcctagaccagattgaatgaaccttggctcataaaagttacaatttcaaaagagagaatagaaactagagtctcctacccccaacccactaagctatagaaaagtcctcaatacacagccctccaactgaaggtctgagggcaagagaaaccggcctcagggatccaaggaaaattcaccaacatcatttaagaataaattgaaagttttgatataggttgaatttgatctcacttgcaaaaatgatgaaaaaagtcataaatgaaaataaaagccaatagtctataaacactttaaaatcaagacgttcatccctaaaatacgagtagctaagaattaataaatctattactatgacatatgctacaataagagtaaaatatgtattgtatacattatatactataaataaacatgatacaagtcaatattaaatagtaacaaaataagtcaatcaattaaaggagaaaattaagcaaattcaatgcccattttttggaaaaccaaacaaaattgccttataacatacttgactattacaaaatgattttaaaatgtatcaaccaatgccaggattttgcaaggtaatatttgttaatttaggggaacttcatgtctagacgttctccctatttgggaaaattttcctattgagttagtcagtgaaaagttccgtcctttctcccacatcagaaatccagggaatgagatgttcattccttttgccggtaggtagagagattgcaggtatatagcctaagcttagcattttttacacttttatctaggaatttaaaccgtgaaccagaggctggggctggggctcacacctgtaatcccaacacttagggaggctcagccaggtggataacttgaggtcaggaattaaagaccagcctggccaatatgatgaaaccccatctctactaaaaacaccaaaattagctgggtgtggtgccgtgcgcctgtaattcaagctgctcaagaggctagggcatgagaatcgcttgaatccagaaggtagagtttgtagtgagccaagatggtgccactgcactccaacttggggacagagtgagactctgaaataaataaataaataaataaataaacaataaaccacgagcaagagacaaacaggaaaaaaaaaaagaatgaacaattatttattttggaagaaacatctgagatggtaggtagtgtcaaagatagcagtgcccagtggtggaggtctcagaaatggtataaaagtcagacaaatcttggttttgcattctccaagtctggttttttagcctctgctgactgctggaactacttgataatcttccaaaaattacttcttgactaaggtcaccaaggccagtttttgtggcttgcacctggactcttggctggcactgggacatgctgcttaatggcgggaaaacaattaataattcccatttaagtcaggaaaaatacaagattgtatatcaccattactatttttagcattgtcctggaagtaaaatgtaattatacaagaagattatgtttggtttacatattgaaaagaaggcagaaaatttatcattatttgtagaccatcctattatctacccagaagatccaggaaaaagagaggaacaaacaaaatatatcataagcaataagataattcagagaggttgctggttacaaaattaaaatgcaaaaattaaagttctctagccacacatagtagccagcatatttaggacagcaaaacaaatatacctgtggcctgagaagatcatgttcagaggtgagcaatgcagacactagtatgctctgtcttattggggaagtttctattggtaagaaataagaggaggtgatatactgggggacgatctgctctaacaagcttgaaaatataattgaagtatagatctcatttaaaagagaaacttagttttaaactataagtaaacttaataggatgcataaagtattctattctgaatagaatgcataaaagttatattatgtgaaaatgcagaagaaatagtggaaagtttgctagaaataattgtcttaatcctcaggtagcatcctctagaagcactaactaacaacaaaataaaacataaacctttaaaatggcaagatcacctggaccaactgctgaaactgagtatcactggcactgtaacaacctgatgccaacctgagccagtctgaaggagacagcatcttctattaagtgctctcaccaaaaatggtgagcctagccaagccttttgacttaactttaggtttacatgaaatagcgatgagaaagtaaaacaactctttgataaaacaatcatatattccgcaggagacttggcctggtcttttcaaaagtcaatgtcatagacaatttttttttttaatggtgagaagcctgttttgtattaaagagatgggaggcatacaacagtgagtaaaatgagtgtcttttgatttgatttttcttttaaaacaaacccaaatcttcatcaattgatgaataactaaataaaatgtggtatatattcacaccgactgattcatgctataacatggatgaacctggaagatattatgctaagtaaaagaagccatacacaaaagctacatactgtgtaggattccatggataaagaatgcttagaataggcaaattcttagagacagtaagtagattagtggttgccatggatgaagaaggggaaatgggagagtcattgctaatggggataggatttccttttgtgttaatgaaaatattctggaattagaattagatagcagtgctggttacacaactgtgctaaaaaccgctaaactgtacaccttgaaaggttgacatttacagtgtacttcaaaataaataaaaaaagtaatgaagctgcaaacaataacaaaacccaaaaggtttataaaaggcatttttaaaatatgtggggaaatttgagcatagattgcatagttaacattaaggaaattatgtaggcgtgataatggtattgtcgttaatagaacaatgtcttttttaggagacacatgttgatatatttagcacttaaagtatcatgatgcctataatttgttctcaaatagttcagcaaaaatataaatgaattaaataaaaattcataaatataaataaaacatggcaaataacaatatatgtatttaaattgtgagtatatggcttattgttgtactcttaatttaacttttcaatatctttaaattttttcatgaagaaaggtttggagagtgactgaggtacttaagacatcactcaggttactagaaggacacccagaaggaactggtcatacggagatatcgaatctattgacattatctagactttcaatgtcctccctatgagaatactgtcagcactgtttttagaacttgagcttatgataggaaaggtcagctggagaaataaacatgtaaaaatagccagagaaattttaaaaatgagaatgaagaaagtggtcaccaaccttatgagctattaaagcattatatagctgggtgtggtggcttgcacctgtaataccagcactttgggaggctgaggtgggcagatcacttgaggtcaggagttaaagacaagactggccaacatggtgaaaccctaactctactaaaaatacaaaaattaaccgggcatggtgacatgtgcctgtaatcccagctactcgggaggctgaagcatgcatgagaatcacttgaacccaggaggcagaggttgcagtgagccgagattgcatgactgcactccagcctgggggacagagcaagactgtctcacagaaaaaaaaaaaaaggaaaagaaaaaaagaaaagaaaaaccaccatataaatcagtttgatatcagtgaaaatggtcattttagagaataaaataggaagctcagaaactgacccaaatatatgtagttatcgcttatatttaaaggtggttttaaatatcagtaggagaaggattatgtaataacttgctctgaaccaaatggctagctgtttgtaaaaagcacatgtggatcttttattccttattctaaatacattctagatgctgtaaatctttaagaaatgaaaccataaaagattagcctgcaggtaatggtatcatagattgtgttttcataattgagtagcaaaaacagagattgaaaaatcactacgtatctgatatttcctcagtggaaattgataccattgttgccattgggaaaacgagtcgtgagtccccaagtttaatggtgctggggatgttcactgcattgcatttgttgaaggcagactttgtggagaagtttgctgttctgaacatcattgaatgaggaacgttactgttactcccttgttcagaaagagagagagagtgtattagtcagggttctctaaagggacagaactaagaggatagatgaatatatgcaggggagtctatgaggagaattgactcacacaatcacatggtaaagtcccacaataggccatctgcaagatgaggagccaggaagctagtccgattcccaaaacctcaaaagtagagaagctgatagtgtagccttcagtctgtggccgaaggcctgagagcccctggcaaaccactggtgtaagtccaagagtccaaaagctgaagaacttggagcctgatgcttcagggcaggaagcatccagcacaggagacagatgaagaccggaagactcagcaagtctgccctttccgttttcttctgcctgcttttatgctggtggctgattaggtggtgcccacccaaattgagggtgggcctggctctcccagtccactgactcaaatgttaatctcctttggcaacaccctcacagacacacccaggaacaatactttgcatccttcaatccagtcaagttgacagtcaatattaaccatcacagagaaggtctcactttgggccaggggtaggaaagggcagcctgtagctagagatgcttgtccagatagttcaaggtcagcagagctttgtgagcaagtgtacgtggtttcaaaggcaaaaatgagtatctgacacccagcatttcgcagccttcaagggacatgctggggacctgcatacttaggcgagttacaataataatgccactttcttacttctgagttgcactgtgaacatggaaattgatcctaagaatgagccctctctatctttggttttaggataaatccaatgtttgttccaaaggtttctccaaatcctggagaagcttatattctcttgtcatttctgtgtcgggcaggctttactgaaaacttgggaagcagagggattttaaatgcccaaataattaattgtcctaaccccaagacttgaaaggtcacaaaagtcacatccccctggttgtttcaggtctctatcctctgactttccttgaaactcaactcctctctttccagtatgcagcacagtctagataggacagctcctactcagcctaagggtgacttttgcacattccaaacctgatgtcctgaccaaaaaacagaaagaaagaaagaaagaaagaaagaaagaaagaaagaaagaaagaaagaaagaaagaaagccagttgctagcttttagcagtaccaaaaataaaattagagaaatcttcagaaacttattttcttttcttcctgctccacacccctccaccccattctctgtaagtgaaagggaaggggagagggaaaaacaggttcattttttaccacacattaaaattttgccacaaacttttaggaggcagaatttttgttttaaatagatttctttttctgtatcacatcactattctcattcacacacttagggttattgaaacggaaatagatacttctgccccaatatccattcttcccttctttctcaaaaagagaagctcaacattttagctcagcttacctaccaagaataaaaacatttctctggtctactttagagttgggtgttactgtgtgactgttttccggcaaatgggacaagctacgcaaaaacaccttgtgacttcgggggagtacatttaatggaaaggatgagcactaatttgctcctttctccatctgctatttaaaacatcactgtgatggctggagatctagaagccatcttggaacatgagttggagtcagcgtgctgatgatgacagcatagcacaaaaaggactgagtccttgggaaaccatgaagctgcttgccctgaaatgcttccctccagactctatctttatggaatagaaacaaattctattttgcttatgtcactgtcatgttgcattttctgtcatttgcaaccaatttattaataatttatatgtctttaactatgctggtttgtttgttgttttggcctgcaagtctttattttctcacgaatacattgtatcctaccaagactcttacagaaaagtaacctccatactgaaggttgcccttcttatagctctaagaggacattcatttccaagctcctaaagcaattacagtatacacatcagtaggtgttcagctgcaagcaagaaaattcctcactcaaactacccgaaccaaaaaacaacttggtcataagttgatgtgaaattcagatgcccagcaggttgctcaattcagtggctccattatgtccagatggacccaggttcttttcctctctttattctcccatattcattgtcagcctcagcctcaagatggtgcccagatgcacttctaggcatcatatctagtcactgtcatgtccatagaagtagagagactttgtgtttctttcacgaaacaaggttcctccagttgaccaaattgggtcacataccagaaactcattgtcaaagataagggattatccctagaggatctggaactagggcagtgacaaagggttgcatatgaagaactagataaagtcccatctggatgaaatttgggtatctaagcaatttaggactctttcagtaaaggatggatgtcaggcagacaatcaagggcagccaccagaaatatgaaccaactacacaattatattacttcttgatcattaatataaaatctttatgttaagtccaaagataggaagagaaatacaactctacttcacctattattcatcttataaagtaaccttcagtaatacagttgagaccctctctctaattgcatccactttcccttcctcatacacagatgcctactcttcaatatttaatgtttataatgtctatgtatttatataagaattaagtatatgcttgtatctctaagaaacatttgggattacctagcaaacataaagattagcataccctaggacacagcaattttattcttaggcacatagtattttgcatgttctaaaaatgtacataaaagcataaaaccattatatattttttgcaacttgtttttttctcaatattatgtttgtaagactttgccatattgttatgtgcagcttcagcttatgtattctcattgctggcattgtatttcattgtataaatatgccacagtagatttacccgtaccccggatgatggaattatgctatttccaaatgtttgctattataaaattctcttatgaacatattgtatatatcttcttgatcaacatgtgcaagagtttctccagatatattcctaggagtaaaattgctaggtcatcagatagatataccttttcagttttactaaatgctgccaaattcttctccaaaatgttggtgccaatttactcacccagcagcaatgaatgagagctcttgttgctctgcatgttttccaaagcttgatagcctcagatttctcattttagccagttgatggttaggaaatgctactgtactgtttgaattttcatttcctggattagtagcaagattgagtgtcttttcacatatttactgttctttgctgttctctcttctgtaacttttcctttcatatactttattcattttgctgttaagtagtttgtcttactgatttgtagaagttatttatatattctggattgtacgttcttcctttgttacatgagctgcagatatattatttctggctgtggcttgccctttcactttctaatgggattattaatgaaccgaaattatagattctggtatattcatgttttctttcaaagtttgcactctttttcataagaaattgtttcctgctttgaggttgagagactgttttattatatgtttccttctaaagtgttaaggatttaaaacaccacgttatccttatctgttatgttacagagagtttttatgattcagttctaagattttgatttcttcttttacttctaagaaagttagaattttaaaaaatttacaaatatgtggggcttttatgtggcttaattttttaaaaaagtatagtaaacataaacataacaaaatttattatcttaaccattttaggtgtatagttcagtacatttacattgtatgcaaccatcatcaccatttccataattctttttatctagaaaaactgaagctgttctcattaaacaactcccattccctagcctcttacattctccattcccctactctccatcccccattccctagcctcttacgttctccattctcctttctgtatctatgaatttgactacactaggtacttcatataagcagaatcctacaatatttgtacttttgtgactggcttatttcacatagcatagctgtcttctggttcatccatgttgtagcacgtatcagacttttcttccttttcgaaactaaataatagtccattgtagggtagaaattttgtccattcatccgttagtggacatttggttgtttccaccaaaatgaataagggctgttgtgaataatgctgctatgaacatggacgtacaggcatctgtttgagcctctgatttcaattttttggagcatatgcctaagagtgaagttgctggatgataaatggtaattttatttttaatttttttagaatctgccctactgttttccatagtggcaacatcattttacgactccaccaacagtgcacaaggattccaatttgtccacatcctcactaatatttgtaatttctgtttaacagtagtcatcctaatgtgtgtgaggtggcatctccttgtggttttgatgcgattctctaatgattattgatgttgatgattttttcatgtgcttattcatcatttatatgacttcctgggaaaaaagcaccaaatcatgtcctttgaccattttttaattgggttgttgagttgtaggagttttttaaaaaaacattctggacggtaatttctgtcacgtgcatccatgtgaagagaccaccaaacaggctttgtgtgaacaataaagctttttagtcacctgggtacagacagtctgagtccaaaaaaggagtcagcaaagggagatggggtggggcagtttttacaggatttgggtaagtagcggaaagttacagtcaaagggggttgttctctggcgggcaggggcgggggtcacaaggtactcggtggcaggaacctgccattttcacttcttttgtagttcttcagttgcctcaggccatctggatgattacaaggaggcttgggctcagaggcctgacaatttcttatcagatataaagtttgcaaatattttctccctttttataggtaacctttccactctgttgattgtgtcctttaatgcacagaggtttattaattcttacgatgttcaacttttttctcttgttgcctatgctcttggtgccatatgaaaaaaaaaaatatatatatatatatagccaaatccaatgtctgaatcttttctctccttgaagaggcgatggtaacaatacttgcttgtatgagtctgtttgggctgccgtaacaccaccacaggctagatggcttaaacaacaggaatgaattttctcacagttctaggggcaggaagttcaagctcaaggtgccgacagtgttggtttcttgtgagggctctctctttggctcatagcggctgccttcttgctgtgtcctctcatgacctttcctctgcacgtgcacattcctggcacctcttcctctttaggaagacaccagtctttttggattagggcctcacctttctgagtttatttaaccttaattacctccttaaaggccctgtctccaaatgcagtcacattagggttagggcttccatctatcaattttgagaggacacaattcatttcacagcactgactcaaaattctgtgagataataaaagtgactcatttagcacagtgctgctatacattttatagtcaattaatgttaccagtgggtatttacaccaccactattattgtttaagaatacaatcaagggtgtgcgaaaactgaactgagaagttcagtatgactaaaagtttatgtcacttttaaatgcttgaaactcaacttaattctacctcttaatagctatgtgaacttatgcaaattacttagttcttctgaaacttagcatcttccactgtaacatgggataatagcagcagcctcatttcaggcttttttgggggatgagggtgtgaattaaataaaataatgcatttaaggtgctaagcacatgcctggcagatagaaatcactaaataaatggtagccactatagcacccaagatagagtggatttataataaatgaaatatctgaggcaactgataattacatgtagtgaaaatgacagagccaggatagtatgaaaacttccagacacacagtttatccatttgccagagatgagccactaacacagttttaaaccttctaggaaccatcccaataaaggaaacatgagcagttaaaaatttcacaacatctacaaggcaaaaaccaaccaactattcgtaagaggcacaactatttatgattttacaaatggatagcattttatactgtgaatcctcaagaggctctccatctccttctgctgtctgggttctcaccgttgctgggttcctgaccctccccaggctatcaagttctgtgagcttctttccattaagttgccttttctgctcaatttaggaaaagtagatttctcttgcatggaaccaaagatacctgtttgatctaaataccattatggggcacacattttgcctcaactctgtgagagctactatcccaggtaattgacatatgttaacttttaatcatataaagtaattacttgaagtaggtaccactggggctcagaaaagttacatgaagtaaatactatttgggtttggaaaacaatgccctaaagtatggcggtttggaatgctgaatgctttgatctaaaggagagccattctctctctgaccttctcccaccccctgtctctcacccctctttccctttcaaagtgcagggaggggctttctctgaagttcccttatctgactacaggaagttcctccagaggcatgtaattttcatgagccttcccactagaatgtcatcaaacagagtagataactcataggaaaggagacttctgaggactactatctgagggactttgtcagtagaataagacaggctatgctcatcatgcatttcctcccttaacccacccatagcttgagtcaccacctcctcaccagaagcctcaagatcctatttctttctgtagctcaaaaagctatttaagcttaactgccttgcccatctttaagtcttttgatatttgtcaggctcctgtgtatatgcatgttaaatctgtgtgcctttttcctattaacctgtcagctgtcaagtctatactacaggctcaaattactaagacttcagaaggtggaaagaaacttcccctcaccccatagttcagtcaacacctgcattttacagatgaggaaattgaatcacagaaaggttaaaactttgtccaagctcacccagctataagtgacagagcaagcatacaaataatactgtccatgaccttgaccactgcctttccatcctggaaatcaagatcagtgcccccaggctctttctgacaacatccctcaatgcaggcttaaggcatcatgccacagcacacttaagaataagcagtctttgtggggagcaaagtgatctggatcaggtgtgtggctgtttataaatctaccttaatccagggatacttcaaagtatctagaggaatgaaaggatttcatatccatcatgcatttctaattaaatcctgttttttttttttgtcgaacatttgaagatgttgagccgctgagcattccaaattatacaccccatcaagtaccagggagccagaggagagtgagtattagtgcaggtcggcctagttaaaatcacaactccatcatttcccagctcggatatctagaaagggttatttaagctccctaattttctcacctgtaaaataatatctatcttacagggctgttgtaataattaaataagaagaaaattttgagtaagcatagctcctgacaaacagcaagtgcctaatgcacatgagctcctgttactgttgtccatgtgtgctactgttacctgcagggcagccatcctgtggtgttagttaactacaggaccattgattaaatgactcaagagcttgggggtaggattgttatcgtctaaaagacaaggaaaatgacatgtttctggatgaacgtcttctccatttccccttaaaattgatcagaggaagcatttgtcatccgatccgcaagttccccagagaataatctttggttggtttaaccacatggaaaaccaggcaaactatatcttccaagcatggttacagaaaaattctaaagctgatctaaccagcagtcactttggccatataaaaagtaaaataaagctcaacaaattcataaatagaaagtccaattttggaaagtcaacttcttccaaaagtaactaactgcagagtgcacacttgaataggtggttagtttcatagggatgttaaatatgcagagcttgaaggaaggtaggtagagatggagtggtttgacaaaccaaagactttggctataaatgattgctctgtagccctttatccttataataacctgtataggtggtaataataaaaccttgccatctggagataatagaatgctaatccttttatatttacattaccaccaaacggcatgcactcagtctagccaagtatttatgtaatattactaaattgaataagcacctaggagatgtttccccagtaaatataggtggatcacaagcataaagtagacatgtggagcaattagaaccctcacacgctgctgttgaaaatgtaaaatagggcagctactggaaaactatttgggagttattaaaaaatttaaacatagagttaaatttgacccagtaattctacacctgggtatatccccaagagaaattaaaacacacatgcatgcaaaaaaacgttgtgcatgcatgtttaaaacaccattattcattattgaaaaaaaaacaccctggaaatgactcaaatatccatgaactaatgaatggataaacaaaatggtacgtctacacaatgaaatattattcaataataaaaaggtgtgaagtattgacatacgctacaaaatgaatgagccttgaaagtattatgctgaatgaaagaaggcaatcacaaaagatcacatattgtatgattctaaatatgcgacaattccagaataggcaaatctatggagatagaagtaaagtagtgaatgcctagggctgaggagagggtggagtagggagtgaatactaatgggtaagaagtttatttttgaagtgataaaaatattctaaacttacatcgtggtgatgattgtacgactctgtgaatgtactgaaaccattgagccgtacactttggattaattctgtggtatgtaaattatatatcaataaagatttaaaaagaaaggattaactaggtagtttggtggagactagggagggaaacattaccctaaaagtagctattgggatgaatcacagatggaatatccaggccaataaactccagagcagtgcctcccatctgggagtgacgctgcccaccaggggacatttggcagtgtctggagacatttgtgttatcacacgagagagggtttctgctggcacctagtgtgtggaggccaaggatgctgctaaataatcctacaatgcacacaggacagctcccaacaacaaaggcttctcagcccaagatgtcaacagtgctgaagttgagaaaccctgcttaaggtgaaaggagttaggcaaagcacctgcttcatagggttgttcttctcacctccaccccaccaaaggagtctgggttaagtagaggtaggaagctgtcacctaatgtatcatttatactaagaatttcacagtctaactgtctacagtctgatttttagagttgcttaccacccggggtctgccttgttagaaattgaccaccatttgatcagtttccaagagctggtagtttagaaataaatagaaaatagtttattattcatctgctccaaccagcgtgttctgtgtttagtgcatctttcatacattctcagtaacaaagaaaagttattggtcatttattgctaaagactggaaaataaatctgtaatagtttacaaataatcagaatccactgtctctgtgttatttctgaatccaacttcacaggatcataagaaattggcaaagtggaggaagggatttttagccattaggtagaccagaaatatttatttgatagaaaatctatactgaagccaataaaaacacatggcagctggaagacatctcatagtacttctagagatactttataattagccacacttagagacaagccaagcagccagtcaatcaagcaaattagtggcaaggaatttgggaaaaggatatgttataaaactgggcacataacaagcacatgcagagaattctcccagaacttgagaacattaaattgaactcagtttgcctgtcaaatataaataaattgccagggggtcaggaggtttggttcacttatctcctagaaactttaggatctcattttctttatggttaaaataaaagggttgaagtaaatgagcagctctcaaaattagtggagcttattaaatatgtccagattttcaaatggaattcctaggaagtctgaatccactggtctggaatcaggcataggcacccatgcttcaagttatgaatgattttcatgtacatcctggttgaggaataacaggacatagtcatcatattgatcctggatgctttacctacccagaggtccagggcttagcatagtgaggcaggaatagtcccctgcaggtaaatcataaaggaaaattaaagaaatctgccagggaagatgagggcctggcatagagggtgctaaggggagggaggattcccgagtgctggatgctgttgctatggcaaccccatcttttcccagcatgtgttctgaaaggctgcctgtgctgtgcggggcggtgggtgggggaggctccaggtctgacgggatgcacattgttcatgtcataaatttggagatgaggacttgtgaatagagcaggataatcaaataaaagcacgtcttaatattaagaaccaacagcatttcttagtaatcttaaatgtttggatgtttggttcatgttcgttgcaggtaacccaaatagaaacctgttttctactttgatttgttttctagagatttttctgagtttgaaactttaatgcttctctccaccccaagcccccacctcacggaggttcattgtatccttatttagaagaacaacaaaaatgacccaaaaagtttaaactaattggagtgaagcagcatgcctgccctcatagtgagcctcaggaggacagactcctcttccactctgagtcagtccttctgcatcatttgctttcccctcatgctccttgtaagatggcaatgacaggaagggaggaaattagctgtggaatggaatactaagtgtggggaatgaaggtccctgggagatcctgacctactcagagttgtttcctcactgatggatcagcagtacaaggtgatgggcaggaggatgtctgaaatgcacattgcagtcacagcttctctactgacccatgaagtctagtgtttattacagcctgcattatactgaatgctgaactcagcattttacatgaattacttgtttagtcctcagaaaaaccctctggtttatgttctattttttatcccattttacagaaggaatgttgagatttagagggttgaaatttagagggtttccatgacttgttcgagatctcgctgctaagtgtgtgatataacaggcccagacacgtgtctgtcaaagcctctgttcttgactaccactgtcttctaatgagccacacagtttttcttgtgtctacatgaaagggttggcttagacaatggcatcttggagtaggtgtcacttgaaataagtttggggagtacacagggaaataaattaaatattttttacaggacttctcaaagcctatatattatgctgatatgtactgataaaacattcatccatttctcacatttatttgatcttggaatagtttgctctcatcttacaggactattgttgaacacaactcactttaggaaatacagaatttggtgatttttaagagtccgattagtattaaagtaaaggctcttctttctctgctcattctggctgtgttcttaatctgtcaagctttctctatccttatcccctcaccttttttttatgacaactttatgaggtactttttggtaatagccattcttacatgtgtgaagtgacatctcattatggttttgatttgtattccctgatggttagtggtgttgagcatttttccatatgcctactggacatttctatgtctctcccaccccaatgtcccaaaatagacattttgaggaatgtctatttaggaactttgccaatttaaaaattttttgtgctgttctattgttatagtccctgacatattgtggatattaaacctttatcagatgtatgtatggtttgccaatattttctcttactctgtaggttgtctcttcactctgttgattgtttcttttgctgtgcagaagctttttagtttgatgcaatctaatttgtatatttttgctttttttcctgggctttggggtcacgtccaaaatcatcattgctgagaccaatgctaagaaagtttttcatgttttttcttctagtagttttatagtagtttcaggtcttacatttaaatctttttaagttgattttttatatggggtgacatgaagtttaaattccattcttccgcatgtggatgtcctagtttgcccaacaccatttattaaaactctttccctcattgtatattcttggcacctttaccaatgatcaattgactgtaaaggcatggccttattttgggccttctattctattctattggcctatatgtctgctttgttccagtaccatgctgctttgattagtatagctttgtagtgcattttgaagtcaaatagtgtgaggcctccagctttgttcttattcctacagattgcttcagctattatggattgtttctggttccaaacaaattttaggattttttttatttaatttctatgaaaaatgttatttgaattttcttagggattgcattgattccatagatcactttgtactatggacatttcaataatattgatttttctgatccatgaacaaggcatgtatttccatttatttgtgtctccaacttatttcattttttttttttacagtttcagtacacaggtctgtatattggctaaagttatttctaagttttttttggatgcaactataaatggaattgattttttaaatttcttttttcaagtaattcattgtttatagaaagtccatttcacatacacacacatgtgcacacacacatacatacacatacattgtgtattgaaactttgttgtatatagacagctcattcgtgtatagaaaggcaacttatttttgtatgttgattttgtatcctgcaactttactgaattcattcattagttctactgatttttggtggactcttagggggtttctatgtataagatcatgtcatcttcaaacaaagacaattttgtttctccctttctgaattaaatgccttttatttctttttctagcctgaatactctagctagaacttccagtgctatgttgaatagaagtggtgggcctggagctcaggaccatgggggccagcctcacattcactggggacaggcctgtgctggggtccatggtgaagtcaggtgctcactctacccccatgaagaaggcatctccttgtgctctgctgcatgagcttgagacagaggtgatgtgggtaacatgaaaccatccttcctaccctcttcaaagcatccttcctcatttgtgctccgccaaggtgttttaatctctcacctgaattccttagctctcccgaaggtattttaactgtgaatggttgtttaaatggatgtttttgtgagggaataagctctggaaactcctatttcacaatgttggtaacatcacttctgtccctccagttttaaagtcagtattctgacttctgatcaaattgagatttattcctggggagggtcaaatgtcacatggtttctcagttgttttaccagccaataagaagctttttgtattgaattaatttccaggcctttttttttcatttccctttcaatttcactaacacaaaataatgtacaacccagaccgcaccagacatgtaagtgaatttggcatgagagctgtcattttgcctgtcactgtgacaggtagttcatcaatactctgacctgcagagggtaaatctaaagcttccaatttgagggaattagggaatgttcatcatcattagcaatagtaaagaaattggagataattcactgaattcttaaaaaagatgcttagcatttcacagatatttatgtaaagataattaattgtgcactctccttttctttgtagagaaacaagaatttgagaatctgtgtcattctgatgagctgtgtggcctggagaatgttcctcaattaattcaagaattatctgtgggcttctattttggaattagcactttgctagatcctggggagatggaaacaataaagtagtcccagctaccaaggagttcaggtctaatgtcttcacattattaattttcatctcaccatttacagtttctagttttctagagagaaatgaatacagaggaggttttacttaccaagttttcttttatgacagagccaaatgtttagagatcatttaaactaatactattaaatatctcctccagtaagtctgataaaactgatccctttgaaaatagttttgtcaaaaatgtcttattttgatgttgtatagtaatatcaatatcttcaacagcctttggcatgaattagcttatgtcaatccccagataacctggtcctaggtagcgcaggtgttacaattacaaaccagtgggtatcttagaaaaatctccgaagagatagagggaacttttctaatgctggttgaaggattgcaccttacagctctacagcaccgggaggtagctgtgatcatctccacatgacaaagataaatggtgtgttttgcctaggatcacatagcaggttagtgctagagtaaagcaagaatttatcactggaaatgaagcaaaatattaatataaatttgctgctctggggtaggatggaatcaaacaccgtaaaaatagagggcatgaatcaacattagaggagccaaccccacacccagaaaggagtgaatctgcgtgggctgaccccctggttattcccccaccacattccaccaggccttcagagagtgcctcagagagtgcctgtctggctttcaaggtgccagaaaccatgcttgttccccttttagattttgacttttaggcagcatgtggctagacagagcactcatgcagaaccaagggaaactaaaaggggtcgactgtgccatgaattatatgcggcattaagggaggttcatctccagtattttagttccagatatctctacttaaccattttcattgtattattctttactttattaattcactcacttcactcccttatttatttactttttcattcattcattcatttactcatttatccactgtctccttatttttgaattcccatatatacatagcaagaataacttcagtattagtataatgaatcaagttgcctaatattgctccatttgtcaactaactaaaatttttccaccgtgggtcttttggctgttacacaatatttttgaaaggttgaggatatttattttgaatgtgaactctaaaatttaaatatatatgttttatctgaggttttctcagatttaaactatatctttttcccacactgtctgtttcacttgaacatttagatatcttgaaattggcttccattggttttattattagttctgcttccacacttaaaaaatatcctgagctgctggctctaatatggttgcgccccaaatatattctagttatttggaagaatgttggtcaaaactcagacatcaaggcagtaggtgacttcaaaagaagccagccagtgagccgttagagcaccttttcccattaaaagcatattgtttgttcctaatcaaattaccgtaggcttgtcaggttgtttctttcacacaactgtttctagtattttcttatgaatgatgttaagctggctagcatgtaattagttactccagcttatattctggtttaaagtaatgatatttcttttatatatatatatatattttattatactttaaattctagggtacatgtgcacaacgtgcaggtttgttacatatgtatacatgtgccatgttggtgtgctgcacccattggcacatatacaccatggaatactatgcagccataaaaaaggatgagttcatgtcctttgtagggacatggatgaagctggaaaccatcattctcagcaaactatcacaaggacgaaaaaccaaacactgcatgttctcactcataggtaggaattgaacaatgagaacacttggacacaggaaggagaacatcacacaccggggcctgttgtggggttgggggaggggggagggatagcattaggagatatacctaatgtagagtaatgatatttcaaaaattttagagccagatagtgtctgttatgagacacatggttatttagcattcgggctgcaagactgtgttttcttcatcatccttggttctctagaacccagcaagtgctgtgaatatagtgcacacacacttatgatggaaaaattatattattttcatcatattttagttctgtgatgtcattttctttgtcccctggctctcaccataatggaggtgaactccaagatttgcttcaggtgtgttagactggctttgcctctcaaaatgtcttctacaccttcccgctggccccatttccaatcctgggaccccagtagccatcttatagtttccttctaggagggaaggatatggatgaacagctacaaggttatgtatggtatctcattttatcttcccagctggtgcttagaaataagtccccttattgcctttttacagatgaggaaaccacagagctgaaggagctggcctgatttgactccaataggcagtgggagacccagggtctcagtacagttgtctgactctgaaacttatgctctttattttacataattctgcctcattttccaaggataacttcttcaattttagagatcagaagctagctttctctgttcctttacttccaaacctctaacactgccactgctaataaatttctttctccaatctctttatctagatctaccagacttgttccttgagcccccatacccatgtaagttgctggctgaatatcccacctctacccaacctcttctgcctgttgcctcctcccatctaccttccattctgtccaacagtccattgcttttcctaccagaggtgaaggctactctctccatctagtcatgctgaaggcaaaagttgcctcaaagaacttccaaaactggataaagagacaaggatgctatatacagaaagttaaaatatgattcaagatctcaactgtcattgaagattatcatgtgagaatgaccacgtgaataggtatgataactatcttttgaatggaccatttgtgctatggaaggtggtcagggaagaacacctggaggaaaaaaatttagctggactgtggaggaatacaggaccaaaataggcagaggacagtgtcaggggcatgccagtcagggacaatggcaggaggaaatgtgccaaggcccaggtgaacacagcgagttcaaagaatgagtggggagcttgagtcaaaagagcttcaggatcttactatgggaaatgatgctttcttttgaagaacagacttaaagaccattgaggtttcaaggataatgttctgttttattattttcattattcagttcaatctttttttgcagattgtttagaacattgctttagcatctcagaggacagataaatttagaaactatgatttaaatgctgacttaggtatttatctggttctgtagaaatgtaccttgcatttctgtaacaattattatttttccttcaattatctgtagtttcagctttgcctctgctgattcttttttagcaatgactgagttgtatatattaaaatgaaattcttctctgtccttttgtaataaattcagctgcagcctgagtattctaactgaatagcctgactgtagctgtgacctgacttcatttttgaggctgtcaaaagtaattagggacagacagattttcccactcagcatctggaaatgcaaagatatggagaaggagtttcaagtatcattaacatctcctttctgcctgctttttatatctccatgtgaaatagtctatttcacagttggcaagatctattatgggagctgtccttccccctatggagcatcagattttccctcgattgggaagaaggaaatgggtgcacatctttagaaaataggatgggtttttttgtcacattggcctgccactgaaagctgtgtgacactgggcaatttgctcattcttgcctgtgttagtttcctcatcagggattagttacttctatagattttgtgaggatcccatgaagtaacacatgtaaaacaacttgcaaagtaatagtttcctttaataaattggacagaaattgtatttcagaaagacttctttgcccccaggaacaatatgattaggagtagcaatatttttggatgagaagaggtgagacacagaatgtcagaaaagtgaaaaggtatatgggtcactgttggaaactatctttcattcaataataaagtcaaagtatatttaaattttttattttttaatgatttaaatcttacagaaaagttgaaatttgcagtgcacctcaaaactcaatcaggtaagggtaaaagatgaaaaaggaggctgaggacaaagattatcttttgtgaattcacaaatttgccaagggctgttccttctcaccatcctcttcttcaattactttgcagacatttattggataaatagccatacatttgcaggacagttttggctagtggaatccagcaatgcacgctcagctaagctttgcctctggggtgcaagataatccagcttctcaggatttaagatggactcttttaatcacaaatccctttttgttgaaaaggacttaataacaaagctattcctccctgtaaaacccaactaactgggctaacctcaggctaacactattaactgtattttctttaggggcattccatttttagaagaagggaccaaatgacaagaagaaagtttaagttattctaaatggcatttgattacaaggattcttcatctgagagtcatgatgtctcatggactcatgtaatcaaacacaaaaaatttttggttactgatataaccctatacaagataaatcagtgtaaattgagccatgaagtacataaaggagtatttagttttggcaggaagcagcatcggataagacacacctcagccaatggaaaaagtggttgccatggtgacactggccaagattggcagatgtcaatcatcagggtaagctgatggttaccagggctgcaaagagagctcacagtgaggaaatcccaaggtcttaggaggattctgggaggttgacatctagacagagtaactgattcatatgcccttatattctccctgtctcaaaattacctttattttattctgcatctaaaaacccttgaaagttaaaggtacatttccagtttggctggacccaccatcatgtgtccggactgatctttttttcctttacctagaaagatctgcaaacgttgtccaagagagacagtcctgtcttctgggaggatttgaagccagttaggggctctgtatttctgaattggattaaatgccaccttccaaaataaagtaggataatcaggtgtgctatcaccttccatccccaagtcttcctcggtttgcctagaaaattagaaacagctgaggctgtggtggtgaaaactgaaaaataagcccatttatagaagacaatgtaggatcagcacacacacacacacacacacacacacacacacacacacacacacggctctgtgattcagtctttaaatttaaattctctaaatttgcatgtagaaatacaaattctcaggcctcaccgcagatttccaaaatcagaaagtccagagtgaagctctgcaatttgtgtttcaatgagaactctagggcaggagcctccaacccctggggtgcggactggtacttgtccgcggtctgctagaaaccgggccgcacaggaggcgagtgtcagctgagcaagcattgcagcctgagctccaccccctgtcaaatcagcagtggcattagattctcaaaggagcaggaaccttattatgaactgtgcatgcgagagatctagattgtgcacttcttatgagaatctaactaactaatgcttgatgatctgaggtggaacagttttaccccaaaatcattcccctcacccccgaccccattcctgaaaaaaattgtcttctacaaaacccgtccctagtgccaaaaaagttggggaccactgctctgggacattctgatgtgtgtgggggttggagaattaccgtgttaaaaaaaactgtaagtgctatgagccagtccccagaagggttctcttctttagttttagttatccaggaaattaaagtaacgttggcattatagttaattgttgtgccttggggaatgaaggcttggatgtttattttcatgtagaaatgaggctcatattctctttcaggtgacttcaagaggaaaaaatgttataacctgaaaagtttacattaatcctttttaactcccatactctgagattccaacttctgtgtagagtagaactgtgggctcctgtccactgcatgccctttctgtgagtcagaggacatgctctccttgactcctcccatggaggggctcttccattagcataccacaacagagaaaagaatctgcacaatcatgcagtctctccagggttcaaagaaagcggcattgtgctgaagtatggaggtgaaattctcattctcttagtaactgctactagaatgtttcttatttgggaaattaacctttgatctggtagctgagatcgtgaggataaaaacgtgctatctgaaggaggtggaactataaaatagaaccaaaggactttgcatgattccagaggcggaaaccctgctgtgcccgagggaggagaggagaccagagaaagcagaagaaggtgggaggggtgatgctgaaagtgatgcacagggtgatgccaaagctcatcttcaggaaagaggcagtggtgaatcctctgtggttgggtgggtgaaggaaatttctagatgcctaaaattaaattaaagaacatttgtgttactgcactagaaatactccttctctcccccactctacttgtaaacattttctgtgtgcaggatattttgtgtgtggaagacaaagtgaagaggtcggttggattctgaggcaggaaagcagcagccaggagacagaggttgccacgaacgtaaacatgccgtgaatatgtccagaaatcctgggcaggactttaaacttccacagagtgtggaagtgggatttggactgtgatttattcaggtttctaaggcaaagatacctcagtggatgacaaatttgcatttatttgtgatggtatttgttcatagtcatcattccaggcaacaattttacactgacaagtgcagagagaatttgctgtattgcccttgacaaatgaaaggaacaacagtcttcttaccaccctggacttccctcctctaggtcaatatttgtgctgtcttgtctctaaaaatgtagtcaaatccactgtggccctaatttaaaccatgatcagagagctcatataaagaagacctgggctcagtgtactcagaacctgtcttcaaaatctctgtacatcttgctactttgaccttgaacattttatacaatccatatgctcttgatcccaaggacctctaaaagcaagtcatgaatatccagtgataactatcttggaccccctacagtctatttccaatggccaccattctgctcagcttctgacccctgaattcctttcctatttatgcgtattcttcactttgatccttgagccaggggcttacaaactcactacctcaatggtacaaagtagataacacaaatgagtgaaatgagttgggagtaagcaatacagagtgggagggactgtggcaaactggagagttcatgcaccatctaacaggtagtggttaccagctccagcaatgtgttcccataggggaaatgcagacccaggctgatagatcttccaatctttaaatgctgacaactcattccaaattattacgaattagtgcttgagcaaaaaaaaaaaaaaaagaaaaaaaaagaaaaaaagaagaagctgtagaacttaggatcccaagcttcagagactttctgggttcaatttctgagtccttcacttccttactgagtgaccttggccaaatggcttaacctccatgtgcttcagctccctcatcagcaaaatgtggagagtaataatcttcacccctcaacgtggtaatgaagatgaagtacattaataggtaatatatgtgaattccttagaggcatgcctggcaaacagaggcatgatatagttgctggctgttgttattaagcctaggggctggtttgatctatggcatttatgacctctcatgtggaggctttggctctacactttgtaatgcccctggctgccctggaaatacactccgcatgcctggcgctccagccagagtggaaatgttggtcatctgctatgaatcactctgcagctggatcctgatgccattgttcaggcctcttgtgtcctgatcctgcagtatctggacactgactccactcttcagttacttaggacccaagtttctgcccccataccccaggtccttagcagggcttccttaactttgtgacatttcacattccctctgctccattgtgctgctgtcccagacttgaaacctcatttcctgaatggacttgaccaggctgcatggccttgtgcctctctgccctgtgtctcccatgttgacctactctagcctacttctgcctaaaccatggctaaagaaaaaagaaataataagctgctaagaaggtaagctcagccactgatttttctacacctacagtttagtgttgcgggaagtcaggggccccgaatggagggacctgatgaagccatggcagaagaacataaattgtgaagatttcatggacatttattagttccccaaattaatacttttataattccttatgcctgtctttactgcaatctctgaatataaattgtgaagatttcatggacatttatcacttccccaatcaatactcttgtgatttcctatgtctgtctttactttaatctcttaatcccatcatcttcgtaagctgaggaggatgtatgtcacctcaggacactgtgatgattgcattaactgcacaaattgtttgtagagcctgtgtgtttgaacaatatcaaatctgggcatcttaagaacaggataacagtgatgttcaggggacaagggagaagtctggctgcctgtgggccgggcagaacagagccatatttctcttctttcaaaagcaaataggagaaatatcgctgaattctttttctccgcaaggaacagccctgagaaagcgaatgggtgcctaggggcaggcctctaaaatggccgctctggggacgtctgtcttttatgattgtagataaaggatgaaataagccctggtctcctgtagtgctcccaggcttattgggacgaggaaattcccacctaataaattttggtcagactggttgtctgctctcaaaccctgtctcctgataagatgttatcaatgacaatgtgtgctggaaacttcattagcaattttaatttcaccccagtcctgtgatcttgccctgcctccatttgccttgtgatattttattaccttgtgaagcatgtgatctctgcgacccacaccctattcgtacactccctccccttttgaaaattactaataaaaacttgctggttttacggctcagggggcatcatgtgatgtgggaacccgccgacatgtaatgtctcccccagacacctagctttaaaatttctctcttctgtactctttccctttatttctcagactggccgacacttaggaaaaacagaaaaggacccacgtgaaatatcaggggctgaatttcccctaatagtttaggagctttgatcccaagtaagagaacattttcaactttctaacattttcaacataacatttaacataagacctcctggccacctcccaacacacacatatacacacacataatattagacaaacctcaaggaaaataaaacagccaaaaataagatacacagtgacaagatatttataaatatgagaaaggcaaacacatgtaggaagaaaagctggatagggaagacagagagaagttggtagctttagtatctaaagaagtaataaccaaactgccgtacagcaccaagtctccaacagctaagaatagaactctgtgaatgcacgattacattgaatattggaccccaaagattatgaacagtatggctgaaggtaaaagcagtgagaggaaactttgaaagctagacttgaggccatacacagtaacatttatatttcattttgcaggttataaagcagtgtcccctcatgaaattatagtcatctatttccacatctgtctgctaaatcagaccatttgctctttgaaagccagaaccatgcctttccgattttgatctctgtgccaagtgcatagcacatcttccacataattgtttccttctgccttcacaataatcccacaagacaggcaaagctgcagttataccaggtgttgactttgttatcattaaacttccttcatgcattgtgccttgtggaaagaaatatggtttctgatcccacagaaaatgagttaggacagcgtagaaacagagaaacaagatgtcttcatccagaagaaccttcaagttcgctatttatcctccagttcggttgctttagagggtgttgagcaaagcaaaagttgggcaacaggaataaaacatgctgttagaacaagacaaatgaaatcaacgttctgtcctgttcttttgtatgctttgggctgtcttggaaaataccctatctgccgagggtcctggtaagggcccttcttgccattctccttgaggaatggagagactgaacacctttatggatcactctgtagcaccaaaatatgactctaaataagtcaccccaaataaaccaatagtaaactcatgggaaatgagcaatccacctatggtcatgctcaccttctctacttctcttgaacttctataggcctccactgtttttccatccatgtttctccaccgaagtctccacaatgatgaaggaaggcagaggaatgagaattcattggaacttgaagcttgccttagcagagatactcaaagtctcatttgaattgtcaaaatgaggtggttgtgctgtttatttattttgtcagcagatttaaattattagcacttcttccatcccatgggtaatttaaatttggccatagaaaacagtaagtacatagaacagtttttgtcttagagtggtaaagaaggataaatattaaaaagtggacagggttattttacgaaggtggaatgaattgatcttaactgcatatatactttccaattgcttcatcccttgggccttccatttgctttttataatttataactcacaacttaaacatttagccatgaaattaaaatggtctaaaaataaagcagtacattttggagccaaataaatccactgccattagcgcacagaaatttgtatgctgctaattgctaattattcatatggctaacataatccaagcagaaagaaaacaaagacaaaaagaaggagatctggggaggactgaaaaaataagccccgagtcaagcagagcaacttcatcaaatttcctgacaataaattaacagagctaccttgcctactcccagtttctcttgagaagccaaactggttgtgtaatctaaagacaaacaacaggcaggagaggagggcaccggatgagagctcttcttttagccttttctgggcccagttgtgaagaggtgcgagtttcagggcccccccagatgagcaataagttggtgtctttatcaggttgtcattagggagcactttttctcctttcatgtctttgggctcatcgttggcaaatggaatgactcagcatgcatcactaattatctttggaagaaatttgtgtccaaggaagaagccaggccgaagtagggaagtgatgtctcctcctacctttctactcaggggctcctgtatgcttttgttcttggagtgagtgtccccagcctcccattgaatgaggtagactttcagagctgagtgggaattaagaaagcatccacttcaattctcacaaacaaactgaagaccagagaagggtgatgatttacccagggccacatggctactaggaagcagaacagggatttcaagccagattcgctgatgtctggaccaaggctctttcaagaaacccctgtgcctgccccacctcccaataaaaacatgtttctgtccaatgccatgaggtctttgatacactttctgtgttttaatgggtgacagtttgtatgaaaaaataatctgtactgccatgtgaatatggacacgtgcatttttttcttttgaataacaagcattgtttgtctaaatattgcaaagcacaaacaatgtggtctgagagctctactcctagataactcctgcagatttttaaagtacatgtacatttttggtaataataaatataacatttattaaattattattatgtgccagacatatattcatatagttctaaaaacagcattctgaagtaaaagttattattcctgttttataaataagagaactgaggcatgcggaaatcacacagctgttgatggaacctggatttaattccagaaagtttggctttaaggcttatgcactcattgatcggatgtaccaaaagttataaaatgtatatcaaagccttctaccatgccctgctggctttcttcccaaaagttagccaatttttagtctcttaccaggaaagaaagtaatgcttgtaccaacatgctatattaatacacagacgcacacactaccgtattaggaggtcctcttctgcatggctgacctctgcctcgtggtcctccggcctttgtctctctctctggatcaccacagtgcctggccctggagtctggagatttcccaagctgcaatcccttaggctgtatgagtaggggtgggagggggtggtattcattccctctctgagtcagtcaggggctccatgagaaacagaaggcagactcgttgcatttgcccggagagagtttaatgaagtgagcaggactaaggaccccagaaaggcagggtgaagccctcaaagaccagcagcagtaggaagccgttaccatctcaagggtggaaggagcaaggggagagatcatgttattggaacttcttccaaggaaaatccttggaagacggggttctggacaggagcagtggccacagagggatgcagacaaatctcaaagaagctacacggaaatagggggaaggagtataaggactgttctcttcatctccaccctccagtttcccgaggaaggttcctctcactggctaatccaactaacgccagggggcaaagaagcccaggagatgccgccctagaggtcagccaccctgggactagaggaggatggagataagcaacgaatagaaggggagcaagtgaataagaactagccatggagccccacgatgatggggagggccaggaaaccccagctttctctatggagaccttcagccaatctccacgagctcagctgcgtccagccctgatccctgctctgccagattcctctttgttgagagtctgagcagctcttgaaggcctttcggccatgccctacagtgtagatggcgtttctgctcctctcccatctgcttctttcctcctacactcagtggacacttctcatccaatgaatgttgtttctctctcattctctttgaatttgtgggtttaaagagtcatctttttttaaaatgccattttagtaaggtcttgagaaggagagaattaaaacgcatgaggtcaaaccactaagtttaactgaaaagtttaatagagccttgaatctttaaatatatgtttttctggataagtttatttctaggtattgtatattttaggttgataattaattgattttttaaaatttattttcaagctaaattcttagttttcagataaggataagatttttaatattaatatttaatataatattttgtacattaacttagttactagtcatcttactaaatgagtttattttttaaattgtaatttatttggctagagtaatctaggtatatgttttctatcagagcaaatgatacatgttgcatgcttctttcacacacacacactatatatacatgtatatatgtatatatacacatacacacatgtctatgtatatatacacatatacacacatgtctatgtatatatacacatatacacacatgtctatgtatatatacacatatacacacatgtctatgtatatatacacatatacacacatgtctatgtatatatacacatatacacacatgtctatgtatatatacacatatacacacatgtctatgtatatatacacatatacacacatgtatatgtatatatacacatatacacatgtgtatgtatatatacacatatacatgtatgtatatatgtgtatatatacatatatgtatatatatacatatgtttgtgtatatatatacacatatatgtgtgtgtgtatatatatatatatatacttagtatatttttcttgtttaacttctttggttagtacttccagaataatgttaaataagttttaatagcattcttgtcctatttataaaatagaaatatttctattttttacctttaaatatggtaattcatattctatatgtgattattccacttcatgactcatatgccatctattcttattatactgtttttccttttaaatgagagggaaatgtaggatatttgcaactgcctttttaaatttaatgagctaatcttatgttttatatcatttgatttacattatactatgttaacaagttatgcattatattagatttttgaattcctggaataaatatttgattacaattccctgttattaacaatatgctcctgagttttatttgctaatatttcattaagatattgactttagtaaccattttcttagaaaacagttatcttaatctaggctttcgattttatttctaaagttgttatacatgttctgttttgtgattattttaattttgtctgtatcaattagtgtttccttttttacattttttttacttcttgtgtgtttccacattcttgcccctttttttcctagttaagtttttcattttcatagtttattattgctattatttaaatatagtttttcttttaagtttgttttggttttgtgtataatctctccttcccacacccctgctccaacattttctaactccttattttattctattttcattatttcctcgcttctgttttctttagattattttattcttctttgtcttttttatttagatgctacatttatttaattttgtatttcctaatgattatatagcatttaagactttaaaatgtgttaggaattaagctttagctataataagttgtgctgattcttaaacatttcttgctctttcattcactgaagttttttccccaaaactgccatagttttgaccctttaataatttatgatggcatcctctttgttattataatgtttactcttttattcttgggagtactgttattattttgtgtggcaaaaaaaaaaaaaaaaaaaaaaaagagttttagcaacatgctctcaaactgcccctgtgagcctcaagtcctgggcatgtgactttttgacatgagtaatttgatctgccaccaagtcaaaagttttttgttgttgttgttgttttgttttgttttttaacatgaggacatggtgacaagtgcaaaagaattaaaagatttaaaaatatacactggattgtgagccagagtctcaaacacagatgtgtcatataggtagtgttctctgattttgtaactgaaaaactttgtggctctccacctgtctctctagtaccatttgatctagcctattcctgatcttctccttgttgaatccagtgatttcttttcatttacttttgtgtacaagtcacagagtagaactcagaatttctagccacctagatggctctcatatcccaaggaaattaacaggggcatcagtagggactggactgtgtccactgctccttggctgaagtgatcttcttgaagccagtagtgcacatgtctttctcaggaagagtttcatgctcactctggcttctggctgtactcagtcttggagctctaactacatttacccctggcttctattatgacatatgcagcatgaacttttgatgaaataatacatatcgtgttgcttaaccaaatgaccccaggagcaggcacacagctacttgctctctctctctccctctctctgccaacctcataccagacttggggtcatgataaactataggaaccttgtgcacaccactcaaatccaagcgaagtagaggtgtctttgacaccaagaggtgccataatgtcatctctctaatgccctccttcataaggatgaattgggcagaaaatgcagtgtttccatccaccaaaggcccagacaagaaacagaagcagagcagtggttctcttccacttttgcttcccccagcatcaaggtgtgagttcactttgcccacttcctttttctaagcctttcctctccttttgtctttgaaactcccttttgtctagtagactgtgccctacagtagaagggatttcaaatcaccatgcaaatctgcacaaccctacatgtgagaatgatggatcactgaaagatggatgtagtatctctgcattagctataaattataactgcagctacctcttacttctctgtagagggcaagtaggagagaacctataactacaccatgtaggttgaaaattgagcatcagtggatacttcgaaatatcctactatgcaaagtaatatgctaaacaaactccccccaaccttaaacttttactgttccttatcacagactcttagatttatgttagggatagggctgtgtaatctcagagtggggaatggtacagatttggtccagagactggggtaaaagttcagaaatggaattaggttggaattaaagtggtgtcgttgccttgggtaaaaatacctgggtttcattgtctcactccaagaagattaaaagaagatctcccaaataggagatccagcttgtggcaagagaaccagatattataggcaggcttgaggaggcggtgtctgatttatgtaaggcccacagattggttggaccaggtgtgacgtttacatagccagcagggaaggctgcccaccccaccctaatcttattatgcaaatgagctttccacttggccagtgtcatcttgtctgctctttaaaggtacacatggctggcaaagaagggaagatggagctgccatgtttgatatggctagccccaggtagccttttcctattggcacaactgccatcattcacccttacaagcttctagcttgcttgcctatgtctgcagctaaattttacaggctgctctttgttacagaatgatttggggactgcttttcattaaaaggaaaaccttactgaggactcctatactttcaccatctgcctaagatttcatcttaactcttacatcagaattaggttgcacccgaaaagtgtgtgatgtagagtcatctgtttaccacacttgagggtctcaggaatggtcctcaagtgccatgtttgtttattctctgagcatttacaagaatcttgaatcatctgcatctcttttgaaactacaataggtgtcttcatttgatttctgctaataaatagacttagctacttattattaattgaattcattttattttccacttgaagtttgcagagtgtacacaacattcttttcaaagactttctggttatgccaaccttatttggtatagtatttttagactgtgagggcattggaggagttagttcacagtgggatctcttattctcagctccagggtagatctttatctttttaatcacaaaaaacacaaattgtaaatcatttaaccagtacaggaatgaataaataaaggtctttatacttggatttggagttaagattggggtaagagacaggcacagagtaatattcaggtacatcaaccatgtgcattaacaggtaataagaaacagtgatttcacattttaactggactgaaaatgcagcaagtaaatgactgcactaacctaacccatcatcaaacaggaatgcttttcttggaaacttggttgtgaaggtgagaagggcagtaattacatgggtctgcatggtcaaaagagtttaacttttttgttgttattgtcaattaaaggcaactcttgggatttgtaaaagctgataagaggagagattcttccaacacaactgggactaaatctgcagatggcacaccaagcagagccaaacccactcccacccttctgttgtatagggctgatgttcctggctttccttcaggtaccagatggaaaacactctcgagcaaccctccttggtgactcactggctcattatcctacaaccagctcaagtatttatacacattgtcatttgatctggtgaattcttcagaacatttggacttgattggtcattttattgaccccattattgactatcatgtgtggtatttaactgaagaggtatttttgaacactcacatatacttttcctacataaaggcaagcatttgtccaaggcagccagtcataggtaaggtagtaaagacttttgcttctattctctctagagttcttgcaataagcagtcccttaatgaagccagatgcatccacttgtacttggctacagcatgatcagtgaaaatgactcagagctgtaattttaatatgccaattattttctaaagaaaaatataggactgctttatatacaaaaagtcatttgtgtctatttcacacattgtaagttctttgcactgggtttgaatgtttactctagaataaagccatcatatttataaggtttagtgttgctgtaaaatttctggctccaaaaatatttgtaaagtctttgtcataaatcatttttaactttgtaaatttgtcaattgtataacatatgtcaggtaaactgcacatgaccagacagttttatgaacataagctgaggccagcctattgtatcatgccagcttatgcacaggttggcagtagacaccttcataaagaaagagataaatctgattcaagctttaaaatagattactcatttattggccccttttactaccatttataagctcacaatttttgaaataaaagggaatcaatctgtcatttaaaactacatgttttatttatttatttaaaatatcatttcttaggttttgggaaaagtttctaagtaaaaatcactcaaaaatccacccttctaaagataacactgatagcatttttatttttcttatggtttagtagtaagaattggacgtggaatcattgtgttaggggagggtaatgtatttgcttaagaataaacataaaatataactggtagattgaattgggtttaggtatgtttcaatatgctctaaatgtggtgcaactagaaatgatatgcgtcaagaaaaggacacactgggaggaacagactggcaaaaagggactgcgcaatatttacatttttgaaacaataaagaagtaagccaagaattcattctggagttcaaacaaataaagcagaggtcttgctaacatgcaactgagtaggaacgacccctttttgtcccaattatgggggaccgcttcttagggtaatgatattattaggctggtgcaaacataattgcagcttttgccattacttttaaatggcaaaagctgaaattatgtttgtaccatcctaacacaatgagaaatgctgcatgcaattgaagtaagcagtaattagggacaaaggtatgtgtgttctagaaagctctaccaagggaaggtcaggaaaggagtttgagaggtttgctcaatgggaaaaagaagagatcatgaggggaatggactgggattctaagtagaaaaaaatgttatggggccctcaggtcagagaggcagattcagacggtgtttaagtgggtgggctttgagttcagactccctgggttcaaatcgtggttgagcaagcaacctagcctcttagtttccttgatagaaaaatgagactggtaatggctgtggtgaagattgtgagaattaaaggatgtagaatgcttaaaacagcactttatttggctcatagtaaagtaactggataaatattagctattattatcccacagtgacttgatcgtgtgcttagtgtaaacaagctgaggtgttgaagcatttcttggccattgctgcatggaagaaacctgaggattaagacatggccaaatgggttttcctgcagggtttatgaaacggcttgcattagtaacaaggggagggggctttttctatttcaataacattctctgcactttagaaaatgtattctgctctattttctacctagagatttaggactgggagatgagagtcaacatttgtatatttttacatttgtggtgccctaacatgtgatttgccttttgattttttatttaatattgtcataagccttttccagttagatctttttatactgttaatgcttaactaatattaatattataatattaacatgcttattattaatgtccacatgatagagtattatatgattgtattatgatgtacttaactattgtttactattagaaattttatgaattctgatattttcctgttataaatgatgtggcaatgagcctttcttactcattcatttccttaggaactacttattgaacacccactatatcccaagctctctgggaggcactgggaagagcagtaaacttgaaataaatcttggtacatctctgatgttctttagggtagattgctggaagcaaaattgctgttcagaagaaatgaacattttaaggctcttgatatctattgccacatactccttagaaacatgctgatttacaggtctgtagtaatagatcctacaattcatcttgaatcaaatataatgtttgtctctcttttcctttctttctttctttctttctttctttctttctttctttctttctttctttctttctttctttctttctttccacttccttccttccttctttccttccttcctttctttcttccttccttttttgagtcagggtcttactctgtctcccaggctggaatgcagtggctcaatcatggctcactgcagactcaagatcctgggctcaagcagccctcctgcctcagcctcctgagtatctagaaccaccagtgtatgccatcgagcctgaataattttttaatgtttttttaaggtagggtcactatattgcccaggttggtcttgaacttctggcctcaaatgatcctcttgcctcagtctcccaaagtgctgggattacaggcatgagccaccacacctggctaaataaaatggttttttaggtattcacataagtttaaaaacatctccacccacttcagaaagcagatggaaactcaattctgagaaatggttttccctttctacatcaggactttcagtatagtgaataaactacagcaactcatttaacttggtgaaatcattttaaaagaatggaaataagaatgagaaagatggagaaagaataaaacatttgctattgattaaccaaggaatatacttttataaaacacatgtttccacattttgaaagcaaagggacatgatttgaggataagtgttcaaaagattatgacaaaaacaatactatagtgagattctaaatgatttcaattttcccctttattttaaactattggatatgtggaaataggatgcatcaaagattggccacatggaaaagggaaaaatggagtgatggggcagaacacattaggtgccagcaacgcaatgaaactcaataggcattaaaaacaaatgcaaaacttggtccactgatcaagctataagccttgtttcaatgtgctttttattaaaatgaaaatcttcctttacatcaatggaaccatagattaattcctgtctttattcttgtggattaaggagctacctgctcaggattttaaaacaagatcacaaaaaacagtttcctttgaaaaatttttgttggagaacattttcttggtgttaaatttagagccttatcagtggcagaataggtgaaaatgacccctaggctcacagcacataatcagtgtaggttccaggagaagacaatgagttggtaccctccttagaggtccagaaagaggtcactggctcatttcctgagaggggaaagtctgatacctgcaaaagactacctacaaggcttggctcagaagcaggattcctgtttctgaaatggttaagtgttcagaatcaccatactctcaggaatactgctaccactaccgcagctaccatttaagctgttaccgtatgctgaatactctaacgactttcgtacacaaacttgttataccttcccaaaagccagggaaagatattctattgacctctataaggcaaagaaagtgagccatggaagggtttgattgcatgtgtaagatcatacaactcccataaaagggtttgaactcagaacttactttaaaaactttgaatggaggattgctcaaagaatgtacttggaaaacaacgtaagagtccagtttcccgacctgaaatacagggtgaataggagcaccaacaaggtaacttaatgctaaatggatgagatctagaatcctgaaatccctaccaactcagaagaaggtcagtctccgaccctagggaatttgtaaggattagatcttagttgtaatggttaaaatacatcatagggaaacctgaggtcattcttgaaactataagcctgtgcctgtgttctcccaaaagagttgacgtgccaggcacagttttcctaatcaaaatccccttcatcttagctgagtttaaaatgatacttcttggtcactcaaaccactaaaaagaaactaaaacaggccaaatttgtcctgaagtcctctccaagtaacaaatcttagagtgaaacttcagaaagcaaagaaaggaagcccctttgagttgatagtatagaggataccccctgcagattctagtcatttctataacatgcaaggctcagtacagagaggctcaaagaaagctcaggtaaaggcaacgctcatctctctctccttttctaagtcttgcctggattctgtataagcagataagctgatctcactcaaagtggaagtcagtgcttattaacggcacacagtgagagaagtacaaaaactgagagtgttttgacatttttatggaaatttgccattgccatgtgttctggttaacaattgctgtttaacaaacatccaaaataaaacaaagtggtctaaaacaaaaatgtattatcacatttcatggttatgtgggttgattgggctcagctgggcatttctcatgtgatgtctgtcttgtgtttgcttttagaaggcagctggagctggagttaactaacgactcagttgaacaaggtctccagaatggttccttcattcacatactgggcacctcttctgaatggctagaacagctggaggctgggtgggcatgtgtctccatgcagcctctccatttggataggttgggcttcctctcaccgtggtggtctcagaatagtcctacctcttaactggtaggtggcttctcctagagaacacacagcaagagaccagggctgggaactgcaagacttctggtgaactagcctggaagtcacacagcatcacttctaccacattctgttgctcacacccacaggcacagcccagatgtaagaggaagaaggggacatatagggataggaataccagaaagtgttcttcatcagggttgtctttggaaactagctaccacaacatgatatccaagtgcatgatgaccaaactcatcttgttgagctctgcataaactggttcaggagtacaactcacatggcaatttgcacatgacacgtgctgcctactggtcatatagattggattcaagcattaccacaaacagtttgagaactctaacctcttaatctttgcttctgcccaatctgtccttatttctacaactacactcaacattggttttcaacctcagtatattcctttgattctcacatattaaattaactttttcttcagcaactccctggaagcagttttttttttctagccacatacatttgatctcaagctctcctcctgctcaaccctcttcttactttggctctgctgtatttttcttcaaccaagccttgctttatagcatgagcagctcagtactaccaaacaacacttgcagacttatgtgatgttcacttttgcctcatgaaatttacattataaaaaagaaaacctttacagattgacaagagtaaagaagcaggcttctttaatatcattaatgtcatttttctctcttgtcagggatttggagatgcagagatttccattaaaaaattattttgaaaatgtcagaacacccaatagcagaagagtaaaaacacctttccccattatccatattcagcagtcctcaagacaattgatttttaagaaaacccgttgatttattagaagactccatagtcaatttctgttgggttggaggagagagcacattcaaaagttctgaactattctggccttattcaaggacagaaatttcatctcttgaacttttgggtaatttatctttcatcatatctggttaccgcacagcaaaatgttttgagaaacacacccctagaaaggagcaaaattccttcccaaggatcaattcagcagatagagtcctgaatatgggtttttataaaggtgttaatgtaatggcgttgtcagggatggtcagtgttgcagagaacaacttctggcatcctcagataggacacaccagaatcagtagaagcatggcttaatctcacactggctgtactagttgtatttctagatgtagacagatttggtagagttaaacaaaaaaatacttgaaatgtgaaactattatagatcctcttgcacagtgaaatgactttgcgtaaatgattcttagatcaaaacatgtttaaacagtcttgttttctaaggcaaacattcgcgttgtagtgcataaagagaacacttggggagaacacaatgttgctcttcaaatatttcagagtctgtcctacaggaaaggaattacacttacccactcttattcctgaggtcagaactaggacaagtgggtagatattgcggggaggtggacttcacatcaacttaacaaaactatatttaaaattaacctttttttcaaagtcgagagagcttccatgtaagatagtgagcttccagtcatggacaaagttaagcacacattgggtaactgccttcgggggaggctgaagagggatttttataatacaagcgtttatttttaattataatacctgtgtgtgtccaggttatgtacatgtaattgtgtattcatggcaaactttgaaaactagaatttttggtagtcccagaagagattaaaagactcaaaacagctttaaacacatcggtgataattatagtactatcatcactgtggcacagtaatatcccaaaagctctataaaagttagacacagtttgtatgttactctcttcacttttcttctagtactgtgttgaacttttgattgtcacaagagactctcgtctgtattcacaagcaaatttttagcatgttgtggtattttagtaaaagcttcatttatctctagtgttgggctgatgctactccataccttgtcaaaaactcagttgatcttaactttccatcagtggcattgctataattataatttaaaatttttggcagtacacatgaaggtttccagtacactggtatgccttaccacaccagttgctatggaaggtacattgggcctggtcatttctaagggtttgaagttacttctctcactttgtgttacatttgtttttagaaagtaaactagtaatgagcaaatagtaccaacatcttatgaaaggtgggagatttttctcctgcaaagataggtttattttaaaattaacaaagggaatccaagaaagccttctaatttctttcctttttcttcccccagaggcctagaatgttattgagtgccagaatctcaaacacatgttttacaaataaaataacatctgtacataaaccattaatcattatattaatcattacatgatttgccttgttttgaagggtagacggtacagctttcatgagcaaatagtcataaaagaatcatatttgctatgcccatgccactctcttgagttgaatgcacgtgtccttagaaaactgcagagaattagcccattgtatttgatgctttttatgtgactgcctgacaagtttaatttttttctaatgacagaagagataaatcatcagtgcataaaatttgaaaaaaatacagataaatgcaaaaaggaatcactactaacccagataatttttgttaacatgttagtaaattttcttaggtattgcagctaaatttccctgggactgtaggaatagatcacatgaaggaaaaagagtcactaataagtcagaaagccaaatcttctgcatatatgatcactgttactatggaaaccaacactttcctggatgtgacaagcaagcatgctgaggaaatgtgagctgatagcatcatagtaggaagctgggaggaggaggcctgtccctgttggaaagctgtgcccgaaattaggacaccaacaggaacatgcagtgcacattggtgtcaccaccaggctaaaagaacctccaaggcctggacgtgacaggagacaaacctgtctgacctctcacaatacccaagccctagcggcaacccaaccacaggggactcttcactgttgtatctcagcacccagagcaaggcatggcaacagacaggcagggaagatgctccccaagtatctgtcaaatgtatgagcaaaaaagttatggtgctcagcacggaggtggtctttctccacaccttttcgttcactcataaatgagccatagtgagtatgtgtttgttatcataaatacaaaagacaatataacaagctggttttgtttttcctaaaaacatatctccttggctccaggaaagcccctagaaccaggaactttgagcacagtggaattttgcactgagatgccagttagagaatcactaggcatggataaccttcctactggaaaagtaatttaatcatagcatgctctggctttgggctatttgctgtaatccgaatagagaaagcattttagaaactgagtgacagtctcctatatttatcctggatccctctttctatgaagctgcaggtaaaactactaactacaattgtaataagaccctccgtgtggtctctgtcactgacaaatacaaaatttctattcgaagagaagagaatgagtttttacatatccctccaattttcaaaaactacagcatctcttatagtcttttttctcagttttttctccagttgaaggtgatctgttgatgaagtccagataacaaggcccacaattttaccataatgttccaaaacaagtgaaacaactctttttaaaaacaatttattcattaatttttattgtcctcagctttattaaggtatagctgacaaaagttgtatatatttacagtatagagtatgatgttttcatatatgtatacattgtgaaatgattaaatcaagttatatactaattattttataaattagagcaatgagtttcctagagattaagaaaatgcagttaataggaaaatgtgagctactgataaagacagtaacctgaataaaacatattatggtcagatctataagctttcatggctggttattaggaatttgggagccaccagttctacgttcaagatgagatccagcctcacttgtcttacttcatctgtactgtgggagttacagctctttttcttctcattgaaaggatccacccatggtcttgacaattattttcaaggttctcccagtcatctacaggtcaggatttacaagtaagattctccttgtgcattttccaaagcagtaaataaaattctaactctaactgacccttctccatgattatgtggatctgaataaaacactcactgtagtcagcatccatgtgtatttgagtccctgttgaaggggaatggcccatttcatgttttatactatatccggagcagacatcacaatgtcacatgacaacgttatgatccagatgtcaattatatttaaatacagccctttgaactcaacaattctctttattaggaagttaataattttgtggggttttttttctgttcttctcgcatggtaggcagaattctaagatagcctccaatattcctgattcctggtgtaaacaacttgtataatctccccagccttgagtgtgagcagaacctgtgagtatggtaaaatattactcctataaatagatatattctatggcaaatgtggagaaatttagaatatataactaaggtcactaatcaattgactttgggttaatcaaaggaaaatcatccaggataaaccagatttcatcagctgatctcttaaaagcaaggttagaggtcagagacaggaaatcaggagacctgcttttgctggccttaaataagatgaaatctgccataagttctataggcaaaaggaactgaattcagttaacttaaatgatcttggaagaagatcctacacatggcagtcttgactgacactgcagttttttgagacctaactggcggattcagctaagctgtgcctggactcctgacccatggaaattgtgaaatcataaatgggtcttgttttaagccactgaatttgtagtaatttgttaaacagcaatagaacagcctcctctctctctttttttttttttttttttgagatggagtctcgctctgtcgcccaggctggagtgcagaggcgctgcaagctctgcctcccaggttcacgccattctcccgcctcagcctcccgagtagctgggactacaggcgccaaccaccacgccatgctaatttttttgaatttttagtagagacggggtttcaccatgttagccaggatggtctcgatctcatgacctcgtgatccgcccacctcagcctcccaaagtgctggtatcgcaggcgtgagccaccgtgcctggccaatgtctcctctcttacacatgtgcacgagaacatacagacacacacaccaatgtctaagctggcccctggccccttttatttttaaggaaacgtttgtttggtagggaacttttccttagaagattccctaaacttcccatgtctactagggaaaggctctctctctctcctgctgtaggcacctctgtcccagtcgcaactatgagcagggtgcacctctgttctctgtgatgtcttagggctctagacacacacctgggagccaatgtgagccaaagaggtcccctgcaggaaacacaaaagaggatgataaggaatgcagggttgcactggagtttagtcttttatgtcttcctccttggaatccaggctgctctcagaacttccagatgctcgcccttgtttagaccttatatacgtgtctgacccttctgcctcagtctgacacctggaagatttggttgataaaactgcctaaccctgatgtccttgtttgtttttctgccattgctccagggccctgccctttgactaagtttgtgactgtattgccttcaaaaaataaaacatcccctggtaaggccatcctaccaggtagatttgcaacaagtgaagccctgggtgagtggggaaagaaaccccactcatcacaagatagtgtaggagttataaataagagccttggagtcagacaacattgaatttgtgctaagtctcttcctgagaaattggaattattttctgtgctccagtctcctcatctgcaaaatgagatgcctacctcatctggtggatggagaattgagtggagaatgcttgtgtgactcttacacagagatgacgagccatttaggaagtcttcatcaactactgctggttccacttcagccctgacttggtttggaggccacattcctctcaacctcagtcttctagagcttagtcatggcaggacttagtgcctggatctttctgacactggccattgactgcctcaaaattagagtcaggaaaccattgcttcaatagctttttgtccaaatagacaataaagtcctgaggatgaaaatatggaagctatatttgtcaatgtgagttgtatgaggaaaaaaaatatggatacacacacacacacacacacacacacacacacacacacacacaagagaatatcccacggaagtagtcaaatatcaggtgagtcattgacatagcctcatagtctcaatcactctgctctatcatggacttacatgtgaacaatctggggccattccatgaaaaatcatctaactggagtcatttttccaaagtttctagggaaaatgaaatcatttgtagtaataacttttaacatataatttgttaattttagccatctgtaactatcagtagctatagagaagggttcttaactaggggtctccagatccctaaggcatccacagatagaaattggtagggaagtcggtagacttggatagaaagaaagtcttaaaaatctttgttttcctagctgacattttccatttgcttccaatttaaatctaggccacagtccatagcactactagcagtatccctgacttgtcaccaacagaagtcatagatattttcacaccatgtttcagttgttgcagttcacaaatcatcatttttacccatcactgcttcaaacttagggtggttatatatcagggtaggcagttatttaatacattaaatgggtagttatttactgcatttattagggcagctagttattaaatgcatgtataaggaaacatatttttgcaaaaaatgtataaccacaacctaatcataagaaaaatgccaggtagacccaaactgaaggacattctaagaccagaactcttcaaaagtaacaagattgtgaaagactaaggagacacaacagctacatgcagtgtcaaaccctggattgaatcctgggacagagaaagaacactagtagaaaaaactgttgaaatccaaataaagtgtacaattttgttcagagtattgcctcaacattaatttcctagtccctaaatgcgccatggttatctaagttgttaacctcaggagaatctgggtgaagagtgtactgaagcactctatattatttttgccacttttctataagtctacgtttatttcaaaattaaaaattaaagtattacattcgggaactgaaaaaataaagaatcacacatattaccctatcatatatttttataatattttggtaaagtatttcaaaataattattttcatttgaaatcctgtgtattttatgattttaaaaagctatcctaagaaggggcacacccaccggcttcctcagactgccagaggaatcatggcagataaagatgaagaatcactgattgaaggcaattgaaagttgcagataccaaatgccaaggctactggattaagatctatgaggaatgcattgacagaggaaactcatcactttggctttagtttggaatgagttggtcttttctttagcatccttcaatgtcattcaacatacgtgtcctggagggaagtctacctagaatgacaggcgagaccaacccactgaaagcttctggccatgagtcacataccccatgcactggacactagcatcccactactctccctgcacagcggtgcagaggctcatctttctctgtgataacacatttgttttgcacttgggttagggttataagattaattacttcctgggatgtttgtttctcagatatgtttccaaaccactaacgtgcacacacaggctctatccttctgccatgcagttatgaaaaaacaaatgaacaaacaaaccttgtagatgttactggccacctctgcaggtgctggtgatgaagtcaaatcaatagcagaatctcactgaaagcaacatgttaagaggcatttagcaatggatatttatccgaattgctgtatgatacaagaggcagagaggagaaaagaggggtgccaataaagaaagtgggataaggaatttggctgcatcatcaggtctactccaaagagagccacaaagtctgcctccaaataagggacgaacacctgaaaaccaaacctacttccttctttcctcttctgacctaaagaggccatggagccctactggaataaacttcagtggctgaaaatggaaacataggtttgctctatttcatgctaaaacctctctttagaaataatctaataaaatggaatgaaaaagtacaagctgttttggtggcagtgaattatgttttggtcagcttgaatggaagtagggcaatattaaagcactatgtcaagagacatggggatgtttactgtccttctgcacttagagtaggcgctcccactcagacctctggagcagagatgccacagaattttgcctgtgtctggccagttaaatgttttgatgctgcccatgtaagggccattattaaatgtgagagctagcaatgttcagacagatttggaactcagaatggcagagggaaatcttaaaatcataattgagtgtaaatgttcactgagggtttggaaacatctcattgggggatcttgaagaaagtatttggaggaactcctggtaattttatttagggatgaacagaggtttaggacatttctaggccctcagcaatctttcataaataccataaggctgtataatctagctatgagctttctctattgaccagaattaaaaacaaggcaagtgtatctttgattccctccaagaacttcctgaactactaaatagaaagtgactttgaacacctactatgtaccagatgatattctaaatgcttttacttcctttaatccttgctatattcttaagagttgagtactactggtcctattttacatttgtgaattctttgtggaataagggttttttgttgttgttgttgctgttgtttggtttttgagacagggtctcactctgttgcccaggttggagtgcagtgctgtgatcagagctcactgcaacctttacctcctaggctcaatgattctcctaactcagcctcccaagtagctgggactacaggcacacaccactatacctagttaattttgaaaaattctttgtagggatgggggtctcaccatattgcccaggctagtcttgaactgttgggctcaagcaatctttccatctcagcctcccaaaccactgggattacaggaatgagccacggtgcccagttaatttagcagcaagctacaggaccctgagtattgcttcctaggctctgtcttcaagaacagaaattgttcatctggttggaaattgtgaatttcgtttcatggaaatccatgctacttttccctaagaaaataataaagttagtatttttggagaggaggaaccataaaatttatgttatatttaaaagcctatcaggattgccttcctgatttggctcttgacttggctgttgttgctgtataggaatgcaagtgatttttgtacattgattttgtactctgaaattttgctgaagttgtttatcaactgaaggaggttttgggccaagactgtggttttctggatatagaatcatgtcatatgcaaacaggcatcatttgacttcctctcttcctatttggatgctctttatttctttttcttgcctgattgctctggctaggacttccaatactatgttgaataggagtggtgagcaaggatatctttgtcttgtgctggttttcaagggaaatgctgctagctttggcctattagatatgatgttgactgtgggtttgtcatagatggctcttattattttgaggtatgttccttcagtacctagtttattgagagtttttaatgtgaaagggttttgaattttttcaaaagcccttttctgcatctattgagataatcatgtggtttttgtctttagttctgtttatatgatgaatcacatttattgatttgtatatgttgaaccaaccctgcatccaggggatgaggcctacttgatcgtggtggattaactttttgatgtgtttgcaagtgttttgttgaggatttttgcatcaatgttcatcaaggatattgccctgaagttttctttgctttgctgtgtttctgccaggttttggtatcaggatgatgctggcctcatagaatgagttggtgaagagtccctcctcctcaattttttgaagtagttttagtaggaatggtaccagctcttatttgtacatctgggagaatttggctatgaatccataagttcttaattttgggggtgggagggtagaaggctatttattactgattgtagtagtctgtttccacactgctgataaagacatactcgagactgagtaatttatgaagaaaaagatgtttaatggactcataattccacatggctggggaggccttacaatcatggcagaagacaaaaggcatatcttacatgacagcaggcaaagagggaatgaaagccaagtgaaaggggttttcccttataaaaccatcagatctcgtgcgacttattcactaccaagagaacagtatgaggaaaaccacccccatgattcagttatctccgaccaggtccctcctacaacacgtgggaattatgggaactacaattcaagatgagaattgggtggggacacagccaaaccatatcactgattctatttcagagttcattattggtctgttcaggaaatcaatttcttcctggttttcttgggaggaatgtttctaggaatttatccatctcttctggattttctagtttgtgtgcataaagatgttcatagtagtttctgatggttgatttaatctctgtggggtcagtggtaacattcccttcatcatttctaattgtgtttatttggatcttccctcttttcttctttattaatctagctagcagcctatctatcttattaacttttttaaaaaaaccaattcctggattcattgatcttttgaatgttttttttttgtttgtttgttagaaagatcttaaattaacaacctaacatcacagctgaaagaaatacggaagcaaaatcaaatcaaccctaactttagcagaagacaagaaataaccaaaatcagaactgaactgaaggaaatcaacacacagacacaggcaaacacacacacacaacatttagtgctatgaatttccctcttaacactgcattagctctgtctcagagattctggtattttatatatctgttctcattagtttcaaagaacttcttaatttctgccttaatttcattatttactcaaaagtcattgaaaagcatgttgtttagtttctatgtaattacatggtagggacctgttgctggccgaaaagtacatgtaggaggtagctggagacactggttgtgaggcactacctggtactgaggagcagggttggggacccactttaaaaagcagtctggccacattttcacaaaggagctgtgctcgggggtccactttagcctatgattgccttggactctccaaagtctgaaggctggaatagctaagtcactgaaacagcaaagataatggcccatcccccacccctctgggagctctgtccagggagatttcaaatctcagttggctgagagcactggcaggggtggctagggaccctagttgggaggtcccacccagtgaggaggaacagaattgggaacccactttaaaaagcagtctgagctgggtgtggtggctcatgcctgtaatcccagcacttcaggaggccgaggcaggtgaatcacctgaggtgaagagttcaagaccagcctggccaatgcagtaaaactccatctttagcacaaatacaaaaattagctgcatgtggtggtgtgtacctattgtcttgctacttgggaggctgaagcacgagaattgcttgaacccagaaggtagaggtttcagtagattgagccactgcacttcaacctgagtgacagagcaagactccatctcaaaaaaaaaattaaaattaaaaaaaaaaaaaagcaatctggccacatcttcacagaacagctgtgctgtgctgggggatcctttccagccctggttgcttggactctccaaaccctgaaaactggaactgctaagtcagccaaacagcaaaggtggcagcccatccctttcctggggagctccatcccagggaagtgcaaagctaccactgctggctggctagaattccacgccagtgggtcttatcctgtgaggtgctatggaagtgaggcctgcagacagtctctggtcagttccctggattcagcctctttcctaggggtatctatggcagtctaacctcctgctttgttggagctgcagctacttttgctgggaagcccggagagcctgagtatctaaggctcccaggtctccacgtgtaccagatggctgctctgccaaggctccacttagctctgaagaccccggtggtgtgagttcatgaggggatctcctgacctgagggttgcaaagatccgtgggagaagcgtgggttcccggggtcacacattcactcacagcttccctgggcagggggtgtttccttggcttggtgttgctcccaagtgggccatcatcctgccttgcttttctccattctccataggtcaggttatttctttgattagtcccagtgcttgcacctggatgtttcagttgaaggtactgtattaactcaccccttccattcctctcggtgagagccacacacactagctgcttctagtcggccatcttggccatggcgacctcccccaactttttttagttgtgcaaatttgttgtaaatattatttcagataaatatgatacaggaaagagttaaagaacatgccagtttatggcagcaaagatagtaaaagtatttccaagccagataggaagattctaatttagaggacatctctgaattaattaacaaagggccatgaacttttaaaagggtgtctcttcagaaatactggtgctggtgaaatgtcattgtaataggatgtaagaggataaacacctaattaagaattcccactaactctgaagccaataaagggtgatagacggttaggaagtccaagcttagggcagtagatattggtgctgtcctaggaagcttccttggggaccagctcggggcaacaagcagtgggctgaaaagaggaaccttcaaatccaaggccaggattcgtgtctggaggcatcaagggccctgtaggataaccacaaagttttgttctttggttctctttgtccagagcaatcatctaaggtagtaaggtagtggtgaagagcacagtctttagagtttgaagaagtgtgttcaaatttctactctgccacttaatagctatgtgatattgggcatgtaactttacctctctgatccttaatttctcattgtaagacaggattataatactatttactacagagactgtcatgaggcttaattagtaaatatatgtaaggaacatggcagagttcctggcatgcagtaagtgtccagtaagtattagaagttaccattattatggctccctgcctaaattccccaccatgggctaggcagaatgaagggggacagggttagagaaatagaagaaatttacaagagttacaccaatacacaaataggtaaatgtcaaaatgtgttgaagccacaggagtcaacaggagtcaggttaatacaaaatatcattatattttctcattaaatattttatttactactatattatagcaaatgcaaaataaaatgcttaaatgaaaaaaagtcataggttctcaaataaacttttttctcataaagtttaaagttcctcaacgttgtatttagaagaacaagacccttaagattggagagcaaccctagtattcattcccctcaaagaaatgacaacgcagtgctacatccacactcactgaggacaaaaaattctttctccaaagcacttatacatgaggtctatatttatattttcctcctctagaatgattctattttctttcaaatcatttagtaccctttatgcatgtttactaagtaatgtacttattgatttattattaccaaataataaatttctcaggaaagtatagcctggcaaaactgtcatacatagctgaaagacttgtcattggttgtgatccctgttagtttgaataattcaacagccatttattgtgcaacgactatgctctagtcactttgcaggtgcacgggttaaagagacagaccaggtcaacctgcatgcacagttcagtgggcaatacggagcagctctaacagcaagtgctgcatagtacctgctgtgtgccacacattattctagcaccactgtaggcatccacactgcctctgaagaactgcccatcaggtaggtactgtcacatacccatcttacacagggggacactggggcacagggagctaaagtaacctacccagaaccctatagctagaaagtggcagagctggaagtagaaccaagtagtctggttgcagagtctaaagtcttcactattagtctgtgctgtctatttaaaagagagaagaaataggcaaacaaggaaacataaaaaagacactttcagagtgacagtgccatgaagtgaaggagtcatagctgccatgaagaaattaaactggacattaataaggaggttggtggtaatttcttgggtgtgggcatgtttgcactgagatgggggactgagcatgaaccagccatggcccaactggccagggagtggtgtgtgcagaagaagggataacacaaggacaaggggttccaggtgggaagaggtttgctgcatcccagaaggctggtggggctagagcatcagaagaggtgtcagatggggttgagagttagagccctaaagattattctaagaagccccttttggagggttttcacatgatgaggacatgaactagcatgcactacagagttgagatgctgtattttgtcttgtgacaaattaaaggagaaagtcatactagtcttggtacttttgacttagacacaatccaccctacaggagcatggtccctctccctacatcagtcacgtgtcacttgaccacaggtcttctgctctgggctcatttccactggctagcagacatatattatcacccctatatacactgctccacacaaaagcttcttgcccatagggcagggattatgtgtttttcagtcaccattctcattcctgcacctggcatggtgcctggagtacaatgagcactctggaaatacatgctatggagaaaaaaagtcagagaaaagacatggagatgagaaaggaatgatggaggagtggtggaataagggaggggaagaaggaagggaagggaggagggtgggcaaaaggaagtgtaaccgcccaaggggctcaccttgcctgctgcctagacagagccaatttatcaagacagcagaattgcaatagagaaagagtaattcggctgggcacggtggctcatgcctgtaatcccagcacttttggaggcccaggtgggcagatcacaagatcaagagttcgagaccagcctggccaacatagtgaaactccgtgtctagtaaaaataccaaaaagaattagccagatgtggtggcatgcacctgtagtcccagcgacttgggaggctgaggcgagagaatctcttgaacccaggaggcagaggttgcagtgagctgagaccacaccattgcactccagcctgggtgacagagtgagactccatttcaaaaaaaaaaaaagaataattcatgcagaactggctgtgcaagaggcaagagactgtagttttattattactcaaataagtctccctgatttgagtagtaatttaaataaattggggatcagagtttttaaggataatttggtgggtagagggccagtgaattgagagtgctgattagttgacttggagatgaaatcattgggagttgaagctgttctcttatgctgagctcctgggtgggggccacagatctggttggcaggtctaggtggggccatctaattgttagaaatgcaaaaacctgaaaagacatctcaaaaggccgaccttaggttcacaatagtgatgttacctttaagaataattggggaagttgtaaatcttatgacctccagaataatggcaggtaatatttagaattccataccctcctattctaacttggtggctggtggcctttcattcattttacaagacgttttagcttttgggaagggctattatttaaactataaactaaatttcttcccaaggctagttcagcctatgcccaggaatggctaaggacagtttcaaggttataagcaagatggagttggttaggtctgatgtctttcactgtcataatttccttagttataattttgcaaaggcagtttcagaagcaggcaagcaggttgcccctgggagtgggcataccttgtctcctacacctggcctcttagttctgctgtcttttgtaggcattccctattcagttcttcctcactgtagtctacagcagaagtagtctaaagctgaccacagagggaatttctttgccttttatctctgctgcttttttgcctggactccaaggaagctgatctttccttgtgtttactgctttgtgcagacatcaaagaaagaagagcaatggtttctggaccagcatttcccaaatgtgcttggctgaaaattttgttaattacatgacaaaaatgccctgtgaatgagctggcggcctggtgggcctgcaggatttgtgacacagcaagggagactctatggaaccactgaattgtcttattgcaatgcctcctctgaacaactgacaccgagacactggagcctgtctcctttgtctttgaggggatctagaaggtaggcagggatcagtgacaacgctgctgctgtatcatgccttcatggtggcaggaggccaaatgtgactcacacacaccgcagcaggctcttcccatgctctggtctataagttggtcacatggccttttcggcctcagtatcttggctcttcacagttcactggagtagctcgcacttcctgagcacgctgagtgctctcagcatgctcatgttgtcttgtgtaatcctcaggactgccctatgagctagggacgatttccatccacatttgaaagatgaggaacctgtgcctaaatcacatcttaagtccaaatggatggatgaaaacactttcattactgggctccctgagttggtgtgagaagcggaatgacttttcagaaggcctctggctggcatccgctatccgcttccctttctaacagatcctggatttgctcagtgtgcctggttaccaggtatcagcttgccagactccattaccactgagggtgcctgtggtaaagttgatattactaaaattgctgttctccaattccccatttaggaagattagagccttgatttacccacacctaggagaggacaaaacaaggatcaccctgaatggtgtcctcatccatgcaaactacgtggaattgatcatattctcaattccactgccttctctccctaccctctcagagttaatacctgatggggagattgcgcatgtgacaatcaataataatacaaggcaggatgtagtaagtattttgggtgtgacccagattgctaagaggacacagaaaaggaagagttgttctgacaggaggatctgaggacacatcatggctttgaaggaggcagggaggcagaaaaagcctccaggaggtaagctcagtatgtgcaaatgcacagaggtggcagtattgagagatggcagggcatcgggggccagctccatctatgcacacacagcagtgggaggggaaggggattttctccagtttttcaatcagtacatgtttcctttttcctcatggtgtgcccttcatctctcccactctgagaacatccttctcttcctctctagccactctaaaaccacaatggatgctttttcctggctttggttaaaaatccttatcccagcacactttctgttctgagtcaggtagctgcctgaaaaaaagacagagagcccagattccacttggggaagatttatctgcatgttatttatgcacctcggttttcagagtgcaacaatttggtcacaaacctggcccaagccacatcaaaagatgggtggcacgaccctgggaagggaactgggaaggaaactgacaaggatgcaccagagcccaggagccccatgtggggatttggtgtgtgcttcggttttgtgtctgtttctctgtgatagtgttgttttctgtcccgtgaggaagaaaccatggctgatggcagctcccaagttttgtatttctcagcttcaaagagagattttgaatttctctttttatccttctggaaggatttgttgtcctagcttgggttaattgagggaccaaagtaataccatggcagcccaaagttgccagttggatcatggagttcagtgccacttgatcctgctcccaagagaagaaggttgcagggaagatggagccccagatatctatgactcttattttcattatctttcatcgtcatctcagtgcagcctctaaggcaaatacattatgtaatttaccaaatattaaatgatgtctggacatttgagctgttgcttattgctttctgttttaatgctaagtgccttggccaagatcccaaggcctcctgcttccacctcacttacctgcctgtttcctgtgtctctccctgccatgtacctccctaggttgcactaattcaaacctttcttctcaaaagatacatcattagctgataccttttacttctttctcacttcctgcttataccacctaattagcaccttttctataatttattaagccagaatacaatggtgacagacatcatgctgcctcactgactagatattttattctatattctttgtttttcaaccagattgtaggtcctattggcaaggatcttgttctacacttccttctcctggatctcatatcataatgtcaaccatatctgttaggttttgctgcataacgaactgtcccaaagcttagtagcttaaaataatagccatggtatttttttaagctcatgcttctgtggattgtcaacatgagctgggctcagctgggctgctctgctggccttgactgggctcattcatgcatttgtgattagtttcttgtcatctaggcagctctgcttctgggagctggctagttactgactggggtgaagaggtggctgggctgcctgtctctcatcatccagcaggctagccctggctcatttacatacagttagcagatttccaagaacagcaatagaggaaagctccaatgtgctagcacgtttcatgtttctgcttgtgccacatttactattgccttgtgaaccaaagcaagtcacatggccaaaatcagagttagtgtaggaggaaaatgatggcatggctatagagagggaaagaacttgtgcccatttttgcaatatattacgttaggtatattctattttttaatttaaaaaatttttataaatatacatctgcctgcttaaattgtataaatcactcttcaaaatatcattagaagtgattatcttgaaatgttttccttctgtagctgtattctattttttactggccttttaaaattctatttgctttctctctctctctctctctctctctctctctctgtcttcccctctcacttttctttttggtctcatttgatcatttcattgaatggctagaatatgtttatcactatgaagttggatcctgcactgtagatttgtgtgcatgcatgtgcacatgtatggtaaatagagaagtctttctcttatgctaagttttaatttctcattattcaagatcatgcgctttagacaaaatcaagtaaggatgacaatgaactgaacacacaatttttacctgtgccaattttctcaatgttctgtgctacaaaaagcaatgatactaaaactgattggacatggcattcatcacttagaatgtaaaagtcctgtaccttctttgaagcacacttgggaaaatcattttgaggcaataatgcttcaagagtggcaaagagctgtggtctattagcttttccattgggcaaccagggatgttgccatttatcttcatttatgatgcccattcctcccagagaaggcccaagcatgtcaactgacatgccaagtcagcaaattacttcaactattttgaccagtggtttcccaatataaattttattcactttatttaatgcctttatttggagaaatgtgttgtacatctagaaaaactactcggacctctttttgtggaggagctgtatcaaattgtaaattttttgaaataaaatgccaaaatagcagcttaagagattgccttgagaagaagagccagaggtgacagacttacacagactgctcaaccagctcctagcactgcagaaggtttaatccccatcataagccctcattttatatcatgcatagtagttctgcttctctgattaaaccattactaatacagacatttttccccttgccctctcaaatcttaccaattcctgttgcctcaagcactgaagagaagtgtagttggcttagtttgggttctccccgaagcaaattttgagaaaaggacttgagagtagatcatttatttgggagatggctccacaaaacacaatgagggagtggggagagtgtgacggggaggagagcagagccaataaagagtatattgatgggtgttacccctgggctctatactgatgagcaatcagcctcagagtcaatatcccagtgggcagaaaggctggacctctgtccacttccttccatcctctgttgggtgagcattgcccaaaaggtatgaactccattgctcttcttgtgtgatcctgcttgtagctccacgagctccaaaggtgccagacagagccctcaggcaggtggagacaggtagagctgcaggtgaactcaggggaactgggggatgtgaggtgtggcatcaacagcatcagctacataaaacatgccctaatgaataaacccaggacagaggatcagcaaacatgggttttgacttcctctctatggttcagatatgagctttgcaatggtggaaaactacctactctctctgagcctccaactttccacttgggaaatgatgtcattggactatttttctaggccaggtaaaagtatactaaacaaacacctataaggagggatggcattatcaggagatggagaatcactaactctctccccttcttcaatttgtgtctttagtatggctgtcctaataaaatcttagttccatttataagagtgaaatgttataatcttttcctcttgtcctttaaaaatccccatcactattagtcagattttgctgcctacaaagcagttggtttacaacaacatttatcttcttgtttatagtctgcggatcgggtttgtctcagctgggcttggttagaatcagctggacttggctcatggctgcaagttgggtttatgtctactccacatgattctctttgaccagctactggggatatgctcttctcatagagattcacagcagtgggagaggcaagccgaagcgcataaacacgtttagcgtctctgttccaatggagttcattaaaatcccattagccgaagaaagtgggcatgggtcaggaccaaatcaaggagtgaaaaagtgcactaagcccaccatgaagccatggaaactgcagggatgtttaattctatcactcacatagtaaaaaattgagagcaataatgctacccaccgcacggttgttgtgctcaaagtcatcttccatgtgagccttaataatacccactctcttggcctttctttaaccattgtagtattgcccggtgtcttagtctgttttgtgctgctataagagaatactacagactgggcaatttataatgaaataaaatttatatcttacagctccaagatcaaggggctaacatctgtcaaggacattcatgctgtgtcatcccatggtggaaggtctaacacgcaagtaggggaagggaactgaactcatccttttatcaggaacccacttccgtgacaaccaaccccctccctcaataattcatcacaaggaaagatacctcatgacctaatcacctcttaaaggttcctcatcttaacactgttgtatggggataaaatttccaacatgtggactttgggagacacattctaactgtagcacctggctaggtctgtcaaataggacttatttgtcctcacttgtcctggcattttcattcctgtggggaaaatgcttgtagtcagtgatctgtgcacactgtcatgcaaccattctccagctgctgtgggtgagtgttggctgttaatggttcatggtgttccccttctctggggttattaacagatggaacatttttctactgatgggacatcctaccctggaagtggcagcccagagacataattgatttatatggagtacaaaagtcagcctccttgcctcaaggggagggtaatttggtagtataatttatgccctagagccccctgtgaatcaggccaagtctaaattttctttgacatcacattcttgattatctcctttctatcttgcttcttttattccctgcagttttctcctaaagtatgtcctcataaaatcacatgcacctaagtcctttttctcaggctctgctcctagggaaactgacctatcttttgatgtctcttttagtaccttctctgtaccctgcacaggtcacaaactgtaactatacatggaatacataaaaatttagatttttttttatttaggatggacaccagaaaccacctcaaggtctactccaatatccccagtcatctgaaatagtcacttcatcttgaccacgtggccatcatgatttcttatccagtatcttacaagatatgcatatgtctgtagtgcctccttattcatcactagaaagaattgtgtctggtcagatgggcctcgacctggtgagccctgagagtttgtagcacccactctcccttttctttacatgaagatgttaacctggggccccaggagagttgacattgatgttcagggaaggagaagggcatgaagtaagcatggtctctggaaattacccatctatgttcaaatcatggttttgctgtttgtaagctgttttgttggccaaatttgttaacaataagccttaatttctataaattaaggacaatacttcaagaacaagaacgttctcctttatacccagaaataatgcgcgttaataactctgatttcctacaagactgtgaaccactggttgtctggcactttttagtagtagcctgaatctgaagtttgtttcatgtggagccaatgagattatgcaagactacgaggcagacctgagcctgaaacattatggcaatagctttcattcattaagagcttcttacatggcagcccctatgctcagccccttgcctgtgttgcctagaaatcccatcaacaaccttatattattccatctcctgcctccttgtaactatgagcagttgattaatcaagtgaccttgaaaatgtttgcagctgctaacttccaactcaggaaatcaagatttagaaggtagaggaattggactaaaaaatatagaagtgtgtggactggaaggattgtatgttatgaaaaaactcaacatgtgcactcagtgagtgcccagttagagcatctaaaatatttggagctaagaggcttgcagggtttgtaccccaattatgcattgaatgatgcatttttgttttctttctgcagaagtaggtctttatcatcacttcaagacccactggttccatcaattctcctaaaagtacatgatgtccttatttcagttttcttctgtatgtccaaattctttctccagcttcttcttcatgttcagatttctgccttaccccatataaattgcctggactttgggggcctaaccctgatttagaggaacagagataaaaaagataaaaatatcctcctctcctttacacccaggaaaatgtgtggttttctacaaggctgtgagctgctgggtgcatagtgcttattagcagtgccctggctctgaaatgatagctccgtgggttttttccatatccacatcttacactggcaccaaatgcagctgtataaatctccagccactaaattctgctctgcaattcccccaggctgttcatttattattaattataaccattatttacatagaactggagagttttacgtcaaggctgaggcctggctgggatgtaaagcagtatgatgagctcagcggcaaaacactccagagatcagtggtcttgtctgtctgcaccgccaccatcccctactaaaggcagaggtggtgaaaggaggtgtgaataggtacagacaggaagtcaagggaggagcaggccttgcatgagcttttgttctctgacaagttttcttttgaggcacagggagctgctgagaggcaggggggtgatgcattctgaagttttgtggttgtaatagtagatgattttatacaggaatttattaatttaatctacagccaatcattgagtttgattatgtgctagggtatagaatacagagattcacaaagaagagatggtctctatcctcctggaatttacattctcttgaattcaaggtcaaaagtgaggttgggacaggagtctgggtgttgggagaggggagggctgtggagtggggtggccaggtgtcgggagtagaagcagaagcagacaatgactcaagagcaaacagcgtgaatgttcttttttatgaagagccattccatctcagcatggcagttttctagtcctagatttttgttctgattctctcttggaagatgaactcgcaggagactccgacatcaatggagtatggcgtcagttgcatttaacactccctacaccagctttctatgtgctaggcactgttctgggggttttccacacattaactcattcaattgtcacaacagcttctaaaggtagatactattattgtttttatcttgtaggtgagaaaatggagttacaagagctcagctatcttgctgagctatacagatgacaaaactgaggcagtctgaatccagtgattctctcacccatggggtcccttgacgtgaagatgctgccataccacccccggcctcttctcacatccaattatcatttacttgcccccccgccaaaaaaaattgattgaatactgacaacatacccagtgctaagaatacagggacagaaagcagattggtggttgccaggggctgaggccctggagggggaagagacaggaactgcctaatggattatggggttttctgctggggtgatgaaaatattttggaactagacagaggtggtggctacacaacattgtgaatatactacatgctactaaactgttcactttaaaatgattcattatgttatgtaaatttcatctcaatgaaaataaaatatggaggaggaggcagggagaggcgagggaggtgtccccactgcctcataatgatggattctaatggcatcttgcacatttcttatatgttgctgagaagacccagaggaggcagggattcattcagccttagtagtcaggaaaactttcactaagagtttctatttgagctgagccttaacaaagattataagctcaggagccttcgcaagccgggacagtcatgtatgtgtgttgtcagcagaaagcagcaggacatggtgaagactttgccaggctgaagtgtccggactcctcccagggatattcaaaattaaaaaattttaacatgtgatggccaaagaaatgaccttgttgacttcagttaagcacattaggggtggatttttaaccacccctttaaaaaggggtgatctttttttttttcaacaaagttataagttttattaaacagtgttggtggggaaaacatttcaagggttccaaataggcacagttgtcttgtattttttgtccaaaattcaacccaggaaagacaattcagacagttacatatcatcttgacctgtctagtgaaccttttgagatttggcaaatggagttcatccagcctcttcccattcaaggttgtaaatatgttcttgttatgatttgttttttctcattaggtagatggttcacttgctgacatgccacagtctcagctgttataaaactgttattagaaaaggttattcctagatggggcataccttcagagttacataatgaccaaggaactcatttcactagccatgttataaaacacatttgtgaagtatgccccacataacaacactttttattgtacctaccatttccaatcttgcacattaatggaaagaacaaatggcatcattaaaactcaattggtgaaatttgtggaaactttacaattgcttctggtcctgttaaatcaaaggtctgcatttttttggaaaacatgagttgttaccttttgaaataatcactggatggcagatctttttagcttcctctgcctttgatattcagtcgattaaaggagacattctccaatataataaataattaaggctaaaggcaaaaatcatactctggtagcacaatctttccacagtgtgctcccaggagacaaagacacaaaacatcacaacctttagcctagtgatttttctctgttgcaagaggcatttacatcaggatttccttcaacctcgatggaaaggtccctctcagatgcttcttaccaattccagtgctgccaaactaacaggtattggctcttttattcatgtttctcacttaaagaaatcttctaccgccttctggaattctcttatacaagctcaggaaaagttttttttttttttttaatgtgggccctccataaaaagttgttttcaaagacagttcattggctatgcagaaatcctaaattgcaaacctattctgagtgtttaattagggtactcccagctgagagatgttaaagtctggagtatactgacttctgttattatccaagtctattggaatatcctgtggtttgactcagcaggtgtgggtgcaatcctctcacaatctcctgactccactttaaagtcttagccttaagtacattcttttctttcacatttgcctcttttgatcaatattttttccagaaaacattggagatcaattagtgagtctgattttgtccttcactgcctggatgggcctgtttcagggagtcatgtcctttgttgaagtatctccaggtctaaaagtgtgtatggctagatcgggccacatttgaataacgagattttgaggggagtgctctccagtctgcttaagtcccaaaaaagttgtcaaatcagatatcttttctgaaccataggcttgattgaccgtattgagcatcttggcaaccattactttggttacactgttatttctaagcaaactcgtgtaaggaataacttgaataacttaaatattacagcaagaacaacaatggcaacaataattgcaatagtgagtaacaaaagttgaagactgaattttggccatgttctgactttagagggtagtcagctgaagagataaaaaagccaaacattttaacactggttgctctaatttactatttagtgtgtgtacggatttttccaacttgatctctactttgttagaagtacttatccaagtgtaacagtgggtattggctacggtgcaaacacctccttcctcagccatgatataattcaaggcaaccattgtacaagggaatagaaggcaaaaaccaggagtatagagaaagcaacatataacaggctgaatatttcagggagtttattcatatacagggggatgttgggtaagcagtcaacttcagctgttgtctgcttcacttccaggtcaatgttagctttaagtttctgattgcttctgaatttaaccctgatcttaaaggatgaggagaattttaatgggagaagacactttcaggtggatatcttaacatgagttagcccagaaacagacccagagacaagaatttggtggcaagtggcttattcaggaggtggaggaagagcagtgaacctgggaagggggacacagaagggcaggggctcagaaagggtggacttacgttccagttgcttctttgggcaactgggacctgatccctgtgtggaaagttaggagcttgtgtaagacacacatttcagaatcatcctagtttgaggatgagggagctggggtgtttatacacctgttactatcagccattggctcagggctgctgtcagggaaaggaagtcctcaaagacagaaatgcagaggctgacagttggtcatccacttggctcaagaaatggtaaggctagagggatgtgggaagagcaccaacagcatttgatatagtgagtgtccttgctgcagaaggaactagaaatatctaagcaaaagcagagagttaatggcttgttagcagaaggtcaggatctgggctacctgacagagagtcagccaattggatgctctcagcaccttgaatccagttgatgatcaatttatggctgcagcatttggtgggagtactgaacccatggtgattggtaatataataaccagcctgctactagactcctcattatccagtgttccttgagcttttccatcacctgagcctggttcttcagttttccctttgattctagagagttgctgatatccttctactaaagtttgttctccacttaaattagcccaagtccatttctattccttgcaaccaaaaacctcaccagtacaagtatggaatcgaataacctgctttaggaaaaagattatgcttaatgtgggtgtcaagacataaatacgagaagagatggagagcataactgtaataatataataccaagcaataatattggatgaggtctaaagaaagagagtgaaattttgacagaaaagagaaataggccctcagtgcataaagcttagatgtcatctggggagaattcttggataagaagggacttgagctctgaagaaaaccacaggagttatcatgggaagacttgtctttaatcaagatatcaaatgccaaaatgcctacaagaaacactgctatcagcttcctagggagtgaccctgaattgacagctaaaaagtgtgatccatcttccctcatccaatttccccagaggcctagcttgggtattgctggtatccccagggtccttcttagtgctttgtaactaatgggtaagatggttccgttcattgtttcctcctgttggtgttatgtattcgccatttcaattccttctggcttagtgctgagaaactgactagagaaggcaacagggcaggattagcaaagtggcttgaaatttaacaaccacttcttacgtgatgcatgaaagattactgttgcagtcttaaggttcattggcaaaaaaaatgcaaaatggccacccagagtggaaacactgagatatgattaacaatcgattatgcattcatgtgagatttaggtgccaaacaaaaatagatgctggctacagatcacaggtggatactttgattagagattacagaagatagtccttaggagaggaaagataaaacgaagaatggagagaaagtctggatgtagagggaggaggtgaggggctcactttcggttctgctaacaagaaaataattgagaaaaatcactgcactcaatggaccttggtatctgtatctgataagtctggtggacagtcagctacaggaagtggaccttttgaatgccattctctccccaatatccaatagtcctcatccttcctttccaccaaggtttgtgcacacaccaacactcactcatctgagaattactgaatcactgcggaagtcaccattttccacaggatgtgttggaagccaaaggaaggtaagtaagaagctctgagacacattgggattgaacaagaatgttttctaaatttcctcctattttaactcttgcttttacaagctgatgttactgaaaaggtactcctcagttcttccagggtttgggttatgtagagggggtctgcccacctctcagggagttgagccactctctgcagttccttccaaagcagcatccttagggggcacatgttgcaccagagatctgggtctgaaacacaatcaggaactacagtggctatcccaggacttcaagtatgtcctgcaaggtaaaatgtgttgagatcaagcttagatctctggacaattcttgaccaaatcatgatgaacttgaagtttgcctttgtctcagtgaaattgtgggtatcacatgggatccttaggagcagagtataagcacagataaaatcaagtccaggtttgtcaaagatcagatgattgtagatatgtgatgttatttatgagtcctctgttctgttccattggtccatatatctgttttggtagcagcaccatgctgttttggttactgtagccttgtagtatagtttgaagtcaggtggcataatgcttccatctttgttctttttgcttaggattgtcttagctatgtgggctcttttttggttccatatgaaatttaaagtagttttttctaattctgtgaaaacagtcaatggtagcttgacagggataccactgaatctataaattactttaggcagtatggccattttcatgatattgattcttcctatccctgagcatggaatgtttttccatttgtttatgtcctcctttatgtccttgtgcagtggtttgtagttctccttgaagagatccttcacatcccttgtaagttgtgttctgatctttgacaaacctgacaaaaacaagcaatggggaaaggattccctatttaataaatggtgttggcaaaactggccagccatatgcagaaaactgaaactggactccttccttacaccttatacaaaaattaactcaagatggattaaagacttaaatgtaagacctaaaaccacaaaaaccctagaagaaaacctaggcaataccattcaggacataggcatgggcaaagacttcatgactaaaacaccaaaagcaatggcaacaaaagcaaaaggtgacaaatgagatctaattaaactaaagagcttctgcacagcaaaaaaacaaaacaaaaacaaaaacaaatactatcatcagagtgaacagacaacctacagaatgggagaaaatttttgcaatctatccatctgacaaagggctaatatccagaatctacaaagaacttaaacaaatttacaagaaaaaaaaaaccatcaaaaagtgggcgagggatatgaactgacacttctcaaaagaagacatttacgcagccaacaaacatatgaaaaaaagctcatcgttgtgcacatgtaccctaaaacttaaagtataataataatttaaaaaatggaaaactgaaaaacaaacaaacaaacaaaaaaacagtcatgcaaactgaaagtgtgcaaagcaatcttcacacttgaactggtcttgaaagatgcctattagattgctgggtgggaggcattttaagccaagtgattgctccaaaagcatgcatgcataattgcaattgttctgtgacttcttaaatttttatcaagacattaaaaattctcttcctgttggctaaaaaaaaaaaagctcgtcatcactggtcattagagaaatgcaaatcaaaaccacaatgagatgccatctcacaccagttagaatgaccatcattaaaaagtcaggaaacaacagatactggagaggatgtggagaaatgggaatgctttttcactgttggtgggagtgtaaattacttcaaccattgtagaagacaatgtggcaattcctcaaggatctagaaccagaaatgtcatttgacccagcaatcccattactgggtatatacccaaaggattataaatcattctactataaagacacatgcacatgtatgtttattgtgacactattcacaatagcaaaaacttggaaccaacccaaatgcccatcaatgatagactggataaagaacatgtggcacatatataacatggaatactatgcagccatcaaaaaagggtgagtttgtgtcctttgcagggacatggatgaagctggaaaccatcattctcagcaaattaacacaagaacagagaaccaaacacagcatattctcactcataagtggaagttgaagaatgagatcacatgaacacagggaggggagcatcacacaccggggcctgtcagggtgtgagggactgatggagagatagcactaggagaaatacttaatgtagatgacaggttgataggtgcagcaaaccaccatggcacgtgtatacccatgtaacaaacctgcatgttctgcacatttatcccagaacttaaaatataataaaaaaaattttttttaaatcaaatgcaagcggttttccaggaaataccagtaagaaatgagaaagtgatgcaaaccagcaagaggagaggaagctggagcattttcctccaaaccctggccatcaatggttgaaggttatttccagggatgccaactttgtggcacttctggcttgtcctgagtaattgtagaaagggctcctatatccagagacaaaacatacaaacaaaaccctctcagcagagagccttaggtgtttgaaataagcagccttcagtgtgtgtaggtgactaccacaggaatctcggcagggcactggcatcatttgcacttgtggggggctgcactaaactcctttgtagtttataaagcattgaacacatgatgatatttctaagctcctttcaccattctttttctctgctgcccccacaaactaccatagtaataatctatcacaagtatggaatgctgctgctggtgtataatttattgtgctcagctctttcctttcatcagttatttctttattcaatcattccaccaaaatgtatagaacattccccaatcccaggagctgcaataggtgctgggggcaaaagcatgaaccaaacaggtgctacctctgcccttatggggaggatagacaagtgaggggccaggcaagggttgaacaattgtataaataaatgtgtataccgggatgaggctcctgatggataaactgcacctctcaatgatctgattaattggtagttcagagaaaaatgcccaagaaaatgacattcaagctgagacttggaggatgagcagaagaaaactaagagaaaagaaggagcaaagtattcaagtagaagtaatagtaggtgcaaagtttctgtgggaagacagaacacatacacttggaggaactcagagtagatcagtgtagctgggccatgaggagtcaggcaggtgtgaggtgagagtggtagggagaagcttgcagaccaacaaggatgcatgaagggtatgtgtagtgggaagccctgaaaagttcaagctacagccaaggggtagagaagggtgaagagttgaattacgttttaaatgattgttcaggttccagagttctaaattgttgcagtaggtcagctacaatcagggagaccagtgaagaggctattccaggaacttagtgatgaggggaaagtagcccgggaggatggcaggagtagcaacagaagacatgagtggaggagggaaatcccgaggaggaaaaacaaaaagacttgagtttatgagtgtgaggagtgaagagaggaaggtgccaagaaggactgaagttctgtgtttctgagcagggcactggcatcatttgcatttgtggggggctgcactaaactcctttgcagtttataaagcattgaacacatgatgacatttctaagctctttcaccattctttttctctgctgcccccacaaactaccataataataatctatcacaagtatggaatgctgctgctggtttataatttattgtgctcagctctttcctttcatcatttatttctttattcaatcattcaaccaaaatgtatagaacattccccaatcccaggagctgcaatgggtcctgggggcaaaagcatgaaccaaacaggtgctacctgcccatttctgtgctactcaaatgaagcagatggcatcattaatttgtttaacgcttactcagcttctaaggatgggtactaatagtatcttgctcattttatgaataaggaaacagcagctcagacaggttaagaaatgtgcccaagggcatacagctaacaagtggcaaagcaaggccgtaaatgaagggcaggtgggcattacaaccgagactctatcaccctcttcatggcaccttctccattacccgtcctatgctactggcttcctcatggtgtctttgtttgtctatatgctttctctccaattatacacagccactgtgtagctgttatcttcttgggaaccttctcagtactgggcgccatccaataaactaatcaataaaactaatttgtgccaacgggggccagatgcacatattttattacaggctttctgaacagtgcctttgtgtgacacttcatgaacagcactcaggacttccacacatgacctggtagctggtggcctcactaaaaatcttgcatggagtttctctcccgacccatctactgcagcactggctctgttggaaggaaagggcttagggtcatgtcagagtccccaagcaaactgccttcatccctaagatcaggttcaagaagaaacagaatgagaagcccgtgttgttcattctttgtaactttagcagccgtcctacttaaaagcacactctagaaagagactctgatgggcctgggattttctagaagctgtcagcaagctctcaacttataaatcaggaattttaaatgaaatctggactcctagggaatactcaaaacaacttttatttccaaacatggttctttatattataaaaaagtaatagtaattctaataaacccaatgtattcacatattgcactcatgaagatttttttcattctcagaaatcacctaaagtgagcaacacaagaaatctaaaggaaagttgttgtccaaatttaatgcaaacttgtacagatgacccagccctgttaactcagtaccacaaatattctcaagagttttcagatattctctctcctcctgtggagactctgtggctggagtgggacctcaccacaaagaaagtaccaaacactcttttgttttagatttttttaatttttaatttttgtagatacatactaagtatatatatttatggggtataaggggtattttgatacaggcatacaatgattaataattacatcagggtaaataagatatccatcacctcaagcatttatcctttttgttacaaacaatccaattatactcttttagttacttttaagtgtacaattaaattattattgactatagtcactctgttgtactatcaaatattaaatttgattcattttttctattttttgtacccattaaccatccctacctccccctgacctcccccaactacccctcccagcctctggtaaccattgttctattctctatctccatgagttcaatcgttttaattttcagcccccacagataagtgagaacatgccaaatttgtttttctgtccctggcttatttcacttaacataatgacctccagtaccaagcactcttaagtagctacacgtagttatgtgtcaagagaagctttgtgcctcactaagaccctgatgagttaatctgctcaacaccactgatatgcagtcagtaggaagtgccataccaaagggcagtggtcagggcgctgtgtttaataatcacctccatctcaggtacacaccctgtgagctcagaagcaggtgcagtcaggatgagaacttcatttggctgcttgtttttgagtgcatagctttcctgccagcctttgtcttcttttccttcaatgactggcttactgtcaacagatagataaagaaaaacattcccaataaagtcccttttaagtatttgatcctctgaatagatgaagaatgatgtttaaaaagacaccctccatcagacttctgcagaggagttattttgtaacaaaaacctattctgattgagaacattacagaaacattaaaaattcttcctccaaagcttggaaattatgtttttcaaaatccctcagaggctttgataaagtctctaaatctgagccatcttgagtttgctattggttctgatttttagaaagacaaattgtcattctagggccatagcaagttcttttccatttccctggaaaacagagcaaagaaaaagtaatgcccatttcagcaaggatcatattttagtgttttaggaaaaagttggaaatacaaaaatataagctgggctaaattttcataataaatgccttaaatggtaacatgaatactttgtgtgatggtagaaacacgggcaagatctcatttaccactggaaaggtctgccaaaggagtgatctccacattgagtaggctccatatgcttagggcatatatggtatattagccaggattcttcagagaaacagaactaacaggacacgtatacacacatgtatgtaaacaaagctttttatataaaatatatatatatccacagatattgagagatagattaattgactgattgattggtgtaaacaaataaattggctcccacaattacagaagctaaaaagtcgcacgatctactatctgcaagctgtgtatcaggaaagttggtggtgtagttctagtcatcctgaatatgaaagaaatagcaccatactttggatgctgatttggaggatatgtagccttgtggagtaccttgccccctagctggtgctgtaattaaatcctccaaaggccattttgtcattttatcaagccagctgcttcaagatggtgggaaacatggtgagaccagtgaattccataagcatcggctcattgtgacactccattgcagtgaagttaattccttgatcagaagcaatgatgtatgaaataccatggaggtggacaaggcattcacatacagtcactacgctctttgcttcttataagtgattgatcagtagcattcaatcttcaatgaatattttgcatatctctaggaataaaataaagatagccatgtcggtaatttccacctaaattgttgatagtcaatgctgtaagtgaatgaaattattgcaagcattgaagaggaagaaataaaatagtcattatttactgatgatatgattatctacattgaaaaatatcccaatatacaaactatttattactacaaattcagaaagattgaaagactgctagatatctgatcaatatgcatcagcagctaattagaaaatataataatgatgataataacagtaataaacccataattaaaaccaacaaaaatgctttgagataagaaatatttatcaaaaggaagagatcatgtcttttgtgggaacatgagtggactggaggctattatcctcagcaaactaacgcagaacagaaaactaaatatcacatgttctcacttataagtgggagctaaatgatgagaatatacggacacaaagaaggaaacaacagacactggggcctacttaagggcaaagggtgggggggggagaggagcagaagagacaactattgggaactgggcttaattcctgggcgatgaaataatctgtacgacacacctcgagacatgagtttacctatgtaacaaacctttacgtgcacctctgaacctaaaataaaagttaggaaaaaaataaatatttatctatcaaaatacgtataaaaccttcatggggaaaaacgtaagactttagtgaaatatataccaaaaaatctaaataaaaggaatgattatagcatgttcatagataggatgttgaaattgcaactactctgtaactccagcaattttatttccaggcatataccttagaagaattatcagaaatgaacactgagagatgatttagaatattcattgtagaactgtatataaaggaaaaataaaaatcaagtagcttaactgtcaatcaatagaagaaatgtatgtatgtgtgtatatatacatatatatgtgccacatatatataacagtatttaaataaaatgggaaaatataccacaatcaaaacatatgcacaaatatgtgtgaatttaaaacaacgttgattcagaaatgaagattgggaagaaatatacagagtatgatgctgtgtaaaattttaaaacaaagaaaatgagactgtgtactttcaatgaatattcttttatgtagtaaaagtataaaactatggctggtaaaaatgcatgccacattgtggatcatgactacctctgggtcagaaggaaatgtgatgggtaaaggaatcaactccatgtggaattttattttattttattttattttattttattttattttattttattttattttattattttattttattttattttattttattttattttattttattttattttattttattttattttattattttattttattacgacaaggtctggctctgtcgcctaggctggagtgcattgtggtaatcttggcttactgcaacctctgcctcccagactcaaccagtcctcccacctcagcctcccaagtagctgggactacaagtacgtgccatcacgcctggccaatttttgtattttcagtagagaagggtttcaccatgttgcccaggctggtctcgaactcctgggttcaagcaatccacccttcttggcctcctaaagtgttgggattacaggcatgatccactgtacccagtcagaatattttatttcttaagaaaaaagaaaaaaaaggagaatctgaaataaactatgttgatatttgttaaatatgaatggtgtgttagttgtgccattagttaaattcataatcaattattgctctcaatttatttcatccctgcttgtttcattgtagaaattaaccttcccataagtgatagtcacctaaatggcaggaactgtatcatatacttttgtttctcccaaagtccttagcacagtgctgtactcacaggtaatatgcagtgaatgcatttgttttaattctgatgaaaaatagggaacactctaagttacaatgaaaaccagcagaggaaacctcctggaagttattagctgcattctcactgtatcctggcagagctttgcactgagatctctcaagagttcttctcaccaaaactttaattccaaaataagtaatcagccacctctatagtgcagaccagagtgtggtgagttctctcaaaacacctcttgagtgtttagaaacgatgtacctgatcctaagcacatccatataatctccctgacaaaggtgccatttttttattaacccactttataaaaaccctgaatatttgttccctttcttagtctccactcagtggtttaagaattaattacaaatcttttaccaggcctcatagcagaaaaatagtaagaagtcctctgtgcaggtaagcctactagaaacatagttggctccaaatgcagtttccatagtgggcctccttctgaatgtctgtgctgatctcatggcctcataccaccagaagtttgtaaaaaaggacaactaatcacttgctacaacttgtcttcaagcaatgatagaaggaactagatcatcaataacaagaattcaagaatcacacacaccccactccttgggaggatacaggatgggtatataaatatgcaaataatgaaagtgaaccacacaggtgagcatgggcacctggagtttaaatgtagaccccacctgtggaagccaagagataggattgtttgatggagtagtagatacgagagacaggggaattctcagtttagagaaaaaggccaagagcccagttactggtttcatgaggcaaggcaagaaagtagatgaaaaggtcaacttttctttttttttttttttttttttttttgagaaggagtcttgctctgtcgcccaggctggagtgtagtggtgcgatctcagctcactgcaagctctgcctcccgggttcacgccattcttctgcctcagcttcccaagtatctgggactacaggcacccgccaccaagcccaactaattttttttttatttttatttttagtagagatggggtttcaccgtgttagccaggatggtctcgatctcccgacctcatgatccacccgcctcggcctcccaaagtgctgggattacaggcgtggaaaaggtcgacttttcattccatgcagagaaatgaaaatcagagaccagtaatttaatctagcatattgggccaaaactacctcattctccaaaacacacacacacacacacacacacacacacacacacacacacgcgcgcacaccagacagcaccccccgacagcggtttccagcatctgaaatttcaccaatgcttaacaacttctttggatgagaaattatttctttggatgagaaatatcttaccgtgaagttaacaaatgaagcctttaatagttataaataaaaggaaagtaatattaagtctagtctgtattgaataaaactctatgaggtagctcttgttatcctcagatgagaaaactggttcagcacaaaaggtcgttgaatattgctgaaggcctcatggttgtcactgggatttaaatccacatccctgtgacaacaaaacccttgcactttccaccactgcatgcgcttcgttatcagttaatggagaactcagtaggccctgaaattggcacctccgagagcaattttgatgaggagtgaagaacagaccacactagggagccgccaattgtggacatgggcagattctgcagcaagcctagacccctggtgaggggacacaatgggtgaaataagcctacctcacaatctggtctctggctggtcccactgtcgagcttgttaatcttccagatttgccaggtggctcttcatccaagacatcaaagaacagccatatataaagtcacattggccccactcctattctgataaacttcactttgcccaccatttcagaacccaggacagctcctccttcccagcctactctgcagaagaaatggtgcccccagtaggttttgaaaactccacatatagcttcctggcaatagtctaaatctatagacagcagacagcatctgagagtggaaatttaaaaagctattagttggttctggttctgagattggcatcaaaggctaagtaaataatgtaatgtttctaatcagagtcatgcagatagcaattaggacagcattacagggattactcatgtcgatctctgtacctgagatcaaactcggctaatttgccactcttattttaattccatcaattacagaaataaattgccaataaaagcttatcttttgaaaaggtttgttttaaccttttataaagcacttggggaaaagctaaagaagagcttcctaagcgactggtaattgatcaagtttgggaaagagatgctgtgaaaaatactacttcaaacaacagcagaacactaacaaatggggataaaagagggagggaaaggtttcctggagtcttctgaagcaaataatttcagcttaaaatggaaatacatgtggaccaggcacggtagctcacgcttgtaatcccagcactttgggaggctgaagcaggcagatcatgaggtcaggagtttgagaccagcctgaccaacatgctgaaaccccgtctctgttaaaaattcaaaaaatagccaggcctggtggtgtgcgcctataatcccagcaactcaggaggctgaggcagtagaatcatttgaatttgggaggtggaggttgcagtgagctaagatggcgccactgcactccagcgtgagagacagagggagactccatctaaaaacaaacaaacaaaaaaaaaacaaaaaaagaatggaaatacatgggaaaactgaaaattatgtttagaacataatataaaaatgacctaacgtgaagaaattggtcttttctactcatcatccattctgtcaccaagtatttgttgagctcttactaggtgccaagttctagaaagacagcaataagctccatagcaaggtccttgcctttgaggagcttgcagctttgttggagagatggtcattagataaatatacacataggcaagtacaaaattattgtattaagaagaggtggtaggcgtgagggcagctatgatgtcatgcaataagatgatgtaagctaaaatgaagaggtcaaaagagtgaaccttcggggtagagttgcatagtggattagagctagtcaggtggaggagagggggatcattccacgcagaaggaatggcctcctgaccttgtcacaggagggaggaaaaacatcagaagatctgaaagaaagtcagactgcccacatacagtggctgatatttactaagccctgacttcaaatcaggttccatataaagcacttctcaatattatctcattttaattaaattattcttaatttatttggcttcatgaggttaagtcacttacctaaggacaaagaatcagtaagttttctattttagtaccaaggtatgtcataaggctctggggagaaatcacccaagttttccttttgaggtgaggggtatgtagtagagaaaagttgatggcaaaggtgggatcactgaggtctctttcagacccttaatggatatccactggcccaagggtttgtgctcagcactgtgtgatcagctggtgagacacagagaattcccaggttcttttattaatccactaaggcaaatatgcagttgctgcagtccaagaataatgccatacacatcacaaatgatggactaaaaagagagaaatgaaagggacagagtaggctgttgcaataatgcaggactggcagaaatgggaataccaagaaaagtggtgaaaagaaggactgtgaaggaaggttggctggaatttagcaactgactgcatggggtggggcaggggccaaggagggttctaagtcttgatgatttccaatgagagtgataggtctttgccatttccaagaagggtgataattcttggccatctccaaggagggtgataggtgttgaccatctccaaagagggttattagtcttgactatctccaaggaagtagttccttcaaggagggtgatagttcttggccatctccaaggagggtgacaagtcttggctatcttgaaaaaaaactgatatgtcctgactatctccaaggaaagtgataggtcttggccctctgcaaggaagtttgtaggtcttggctatcttcaaagaaagtgataggtcttgaccatctcaaaggagggtgatacatcttgactattaactatctgcaaggagagtgatagttcttggccatctgcaagaggctgatcatgaccaagaaagatgtaacacagtggaaagagaaaagtcaaaggggaaggcagtttatctacaggaaggaagcaatgtggaaggtcacggacatgaatgagaggttaaccaacacaagcccagggatctccagccctggtgttaatggtgctgcttggacagcagatgaggtattgtaccgcagccaccacattctcatcccatagtcattatgttactgttttcaggccaagataaatgtaagacttagtggatgccccaggtccatgtggccccctggttgaggtgtgggaacccagaagagtagtccaataagcagcaggcaggcctccttttgcttcatggaccttgaatgttccttcctcataacaatatgtgccattttgtcctgaaatactttctatttgtctcggtcttcccagctgaactgaagtttgctgagggcaacaaatgtctcatgtcctactcgcagtttgtttccccagtgtttggcacagatcctggtatttgtcaacttgagcccacactaatgtctaaaaaaggctcacttattcaaagtctgtcactcactacacttacttggagggtggatttcaggagaaagtctaaaatataaacattgtggtttgagacagagaatcttagctctggaaggagccttaatcacccagccagatttcttgattatacaagagacaaaattcaagtccccaagacaggaatgaattatccaagatggcagagctagggtaaaaaaatctagcttgcacaactcagtatctccccatgccccatagtaacacctaagtattctttccaagcttattgctgcctaacttttatcgtgattttcaccatgatgtatgtcttagaagaccagtgtgcctaaggtgtaagttagagggcctagagagagaacacaagaccaagaacacactctctcagcctctgcttctgccttgacctgccctggtgcactataagtgcatacatatgtgtggggttatgaattaatgatttcttcccaaatagagtgcttagcatcatgaaggcaaggaccaggtcttggttgttgacttctatatttagggctatggcatatggtagacaacaaaaaaatatttgcatgactaaataaataaatggataaatagcctcccctattaatcttcagttcaggaatgccatcgtagctagggaattccaagcttctcaacctcttttgtacccactgatctctatatcccaaacttctgggtaaagagcaactggttagacccagtgctgggataactgatatgaattggattagtatagggcatataagttctcctattttgttgaatgcagccagaactaaacaatttcttttcatttcaggctttttgaagaaacaatatgtatcatttaaagaacaacaacaaaaataaacccttgtaaatattgcacttccatttgcaagcagaagattaatacaataataacaccttggatatgaaaaacaaacactcagtgaaatgcaaacctggctaaaagaaattgccttctttcttggagaagagtcacaggagactagaacacaaattatttttcttagctctgggcctttagggtatcaaagcttcctgaaaaggatcatgcatcacggaaagtgttaatgtaccttattattccatttctctctgatgaattctttggaatcaataaggtacttaacagttaagaatttcattaggttgcattgcaataccaggaatctcttagatttatataacacctatcttcagcaagttcttttaaagcaatcatagaggaaaatatgttctcctgctgtgtgaactcagtgaatcatgtcgacatagggtatttttctccttgtggactcattgagtcttgagtaagacagagtttacgcaagcattgcaagttttctgtatgtttatcttgctgtttgtatgtttctaaaatatataattccactaagtatgtgtccaaaagtggcctgaaagatgaggaggaaaataactacactgtttgacagagaacttgacttggtatttagctgggaagatcagacaggaagacagggaaagttgactaattctgcaaaacaataatgcagaaaaaagtcataaggtagccctttgcacaatcacttcatgaagggtaaatctagaggagctgagaattcaggggtgggcattttccattgaggctgaagtgttctgagaagaaaagagttgaccttgaaggattggcagaaaagagcactgagactattccaagaggcatcccagagtggcacagtatttgtgttgattatgcatttcttgtgattcttgtctatttcaaatccattcatgaaggcaatgatcaatgtaaagacctgagtggctatgatcgataaagaaacagaaatgaaggtcaatgttctaccaatgctgatgtaccggtctgagctgcagaagcacctgctttgcaatgtttctccatcttaattactttgtaaatctcacaatcatagaagatcctgcaactaaaacattctattgctttgcgatttaaccatcctttgatctcttaattatactaaggtcctttgataaaataacctgcttcaacacaagacttagcacgttttctgtgagccctacaaattatatatagctaccaaagagtacaaaagtttcccatttataaagctgatccacatataccgacttgaacccatctatatatttgtgttcatttggcagaacttacaatgaaaatcaacttctctgaaaccctgtatggtgctgagtgttgtgagagatatcacagccttgagtcaagctaattcattggaatcatgaatagtctctaaataggcacatgccaggaaaataaaaaaggctattaagagaatgaaaatatccaagaaagccgtcatggggtaacggtgatcaggggttgggagggaggaagacaggataggtcagttcaatccatgcatgtttgttaaacatttggggttctctttgcttgtatacacaggacttccttagagtttacaaatttagagagacatagtacatgtgattcattttagagagtttttttttctcaagtacaatgaaattcttttactgtgcaatgaaaattcagcaaccattctgatcatctttctggtttctattccacatgcttgggacaggtttctttgaaccattcttatcccagtgcattataactttggttttaccttatttttctcctctgtgcatgccagcatatcagtcattttcctaaagttaataggaagattatacagtagtaaaatctactgggaaacttctatgccttgataaacaccccctcttccacctccatactaattaatttcagttctaatcactttattctttgtgtgaaacaaaacatctaaatttgttccttataatctgtctaccttcagattcctaaaaatatctcaaaacatgcataaacataaggttctgagaagcaggctttatctcttaacccttagcatttttcaacttgaaaacttcattgtcagagaaatcagatgcaaaacattatctttttagccaaagaaacatttcctatatctttgtgatgttgcttattcaaagtagattttcttatgttggtttcagatcacattaattgcactatttatttcttttccctttgagattgttatttatctgttcttgctgtctccagaatacatttcctactagcaggaagccctgaatgatgaataaatataatttaaactttaccaggcttgaaggcactgatatataaattttttgtttgctgatagcaatagactttttagtaaaaaaaaaaaaaaaaaaaaaagacagaaacgaacaaacaaaaagtaaaatgaagcatcaaattggaaaaaagaggacattgtctcaagttcaggggcttacatcaatctatgggttctagggaagtttgtgggcacctttgtttgtgcactaacaaaggaaagtagcaagaaggcattatggctgcctctaggaccttcatagaagccctaaacaaggtttcattcaatcttcctatttttaaataaaacactggggaagcatatgagtaatgatacataaaaaagtatgctgtagtggaaagagcatggatggagagtcagggaacctggattcttgtccttgacttaccttctccggaggcatttgatttttgactgaccttgtcctctttatatggcttggctacttcatttgtggaatgagaagttgaataaagaaaattatcttttctagttctaatgaataatgatgctataatagtaagtgcttgccaataaaatggaagacctgaattctcagtgtgagcttctttctccttgtgttatacagatctagaaacctcagcatgcagactgtagagcgtcacgttctaccttcaggttagttgtcctactttgggtatggtgagacagtgcagagagctggagtaggtaacattgtagaactactcctgtgcactcaagagaaggtgccagaatcgggactgtagtgatcgccacaagggtggccatttgctgggattctgaatcaatgtgtttcaaggttgagaaggccttctggaatatccaaatggattccattaatggttgaatgaagggttgttttaatggaactaattttattacttgtctgcaaatctataatttatatggctctaccttgtattgttctatggaaatttttgttttacctctttagcataccctgaaggcactagtacttcttattcaatgcatgtatggatgtttgtattttccaagaaaaatactataaattttgtaaaatcctgccatagtcagctctagagcaatggaatacctgtgtgtatgataacctgaatgataaggccatttctttttaagactttaagcctattgctttctctttcagcccctagatcagtgtcctttctaattgaacacatatcccttctgtcttccctcaaattgttgtctctcttagaaatggaataatgtgagaatgctggccactataggtgatatgtctgacttcatcttctgttatttttattatctttctttgaaggcttcaaaaagaaatgctatcttgtacatggtaagcctcaggctggtgaatgccatttcaggctcatgggaaggaatttgtttcttgtcttgaaccctttttgctcctgccggaggctggatttatttacgatgttatgcactaaccacaggtctgtaatacatttgaaaataggaacgcccttgagatgcttgtcttattagtttggcaggtggaaacaatcttgcagctggaatccctggagtacagggcagggccattggatccatttgttctgaaccatctactcataaataccatttatgaaattaagttcttacactatgactggagtttggaaagaaatggagggaggaagttggaaaggaatattctcataagggatgagggtgagctgtctgggaaatcatgttcttcatgtgagaaaacgaaataattgtccacacatgttcacacacataagagcaatttacccctttaggactgtgttctattttcatccatcccctcaatgacatacctgatgctctttatctaattgatgacatgtcagtcttaggatgtttcacaccttctttcatgagtagggtagtgttagaacagttagaatggaaattctttaccttcccattatttgcaaaacaggctttacttgggatcttacctatacatctggttggcccaaaatggtgttggcttatgtctgttgtcatggaatacttgttaatagcatcccctttccctgtgaaaaggccatggtttgaatgttaaatgatagaggcaccgcagctttgccatgctggtaccaagatgtcctaattacatggaccaagatgttgactttaaagtattttttggcctgtgtctataaagagctcatgacatcacaaactgaaacaactggcttatcatgaagattcattagctaggtgcaaagacaagtcagaaatagggttcatttccctctacttttcatgatgatcttctgcttaatatgaggtatgggttattgtggggatggagtgaaactcatctagaggataattgtaaagagtgctgcactgtgattttgagatgtcacatcacatattcccataatgtttgtggtcattagatgcacaaataagcagtcatgactacctgtagaagccttggttctgaccacatcagtgtactgaaatgtagagcttgtgttagattgaccttttccagtttctcttcttaattctctccaccccattcttctctctccaccttctacccagaggtagcgagaagcctagctcactgtgttttgactagtggttaaattagaaatatacctgtagaggtgaatcaattacgtaagtgttgatttgtcatgggacagctttatggttgatggagtctaattggttctttatttctatatttggtattctgccaccagataatacgaaaaactcaattaattgccatgggatgattaagtcaattgctttatattctagtgtttaatcagtcaatgttcctgtacataccactgacattttggcagcatagcaattaaggcactacttgccctatttataggtaatgaatgctttgagttatacaaaggcaataatcctcaattactgctttcctaaattcaatttaattaaaaattttcccagattatgtctttttcaatgggagaacattaagtattcattcttataggcccatgatttaacattgtaacttggtccaattctttaaatagtaatgtataaactaggatgcttagtagttagtttatgggtgcacgtttgaagattatggaattgatggaacaataaacaaatgcatgtgactgaaaaacacccagcccacttgtgtaggagcaccttccaaatcactgtcatatgaaatcatgctggaatatttgtgagctttgtcttgacactttgtgaggccaaaaatgctggactctctatacttttcataaatgcagatcatgaactatcaatgctgattatgaagtcaatgttggaactgcctcatatttaagtagtgatgatcaatgatgatcagttgatataaagattgtttacagatatatctgcatataattctgtcaactacatgacaaggtattattgtctccattttgccaataaattgagaagctggtttgaagttagagatgtagatttaagagttattaaggtccatctcgttttggaaaataatagactatgccactttccagaatcttagaaaggagtaatgataagctgtcctagaaaccatttgaaggaaaggaatgtcatttccttcagcttatcatgagaactagccttagccgaagcaaggtcacttttttgaaatgcacttgttttgtaaaaaggatggctagactgacccaatgcattgaaatgtccaggactcaatctcctgtccaccagctccttaggatcttttcagcctgcagactggacgtgcacacagtggcaggcaatgtatctctggattttcacgctcctggagtagatgagctgtgtttgctataaaatgtcatgtttgctgtgtatctgggaagacttaatgaagcattgtgcacgcagaggcaggatgatgctgacattaatcattgctgctaacttctggatgtgaaagcaggtggcgacacccatggcttctcagacagcacaggttgaggatgtgagttgatcctactggttttcctttaggagcctattttctttttctgttgtcatttctatattcctactgaaggaacaactgttacagaaacacttaaggaatacatggaaacatgtgtgagtgtgtaaagctgtgtgaaaccagctttactttattcatccccttttttcaaaggaagttaataaatatgatcagaaacactctcttgaggaacaagcaacaggaaaaaaataatactttccaagaagaaccaaaatatttcagtcctttgaagggctaaattctgggatccctaaaactctttcccttctattagacctgtcctgtcttttcccagtttatttcctttgttatgaaagcacctggagaaaggtgctaggttcacatggagccaaccaggcatggcactcccatgccactttactgtcaacaaaaaggttgactgtgttatctattccattcttaaagttctccaggcagaggtttgtaaaacagcattgggactgttggttttgtgacactgggagtcttcttgctctctctcccatcttcttcttgtccagagtcaccattgtagtattttttaggcatactgaaaacatttaagaccatgttagattttcaagagccacttggttgataactcatggcaactgttttcagaacaccaatgcagttgccaagtgggctagcagtaagccttgacctatttcagtacataggtacctgttttgttttagagttaactgtttacaaaaaagttagaattccagaaccaatactttcctacatgaaagtgccatgggatctgggcttaaatgaccagagccaggcctctgatactttggagagcagcatacccagtcttgggatcatgctgacaggttcccaagcacacttcaaagtgaaggggctactatcatcagtcccacatgcagttcttataaaagagacgaccccaggacataaaaaagccttttatcactctgaaaacctttattactgttgagaagcagaccttttgcaccttctaatgattttattaagtactaagctaacagaacaagcccccttttagtgcctgaaataaatcatctgacttttaaacctttcttaagagactatatagatatgaaattatatataatgttaagaaaaacaaggataattaaatgctcttttatttttcaaaggtgataacgttcatttgtaattcttacagaaggtgcaaactgtgagttgaatctcccaaagaaccagatccgaaataattattctaaaaatataatagcatccagccaataatctaagcaaatagagacaaggtagcattatacagccaattaagctatacactcttcatgcggcatcccaggagttaatcaaacacccactctagatgacagaccaacaagtgaagggaactggaaatctttaggaccacctttgcattttctgtataaagatgggcacactgccaagtcaccagcagacatgcatgttaagttgtttgactagcaatggagattaattttcattaaaccatctgcaacagaccaaattatttgtgtctctccaaaattcatacgttggaattctaatcccattgtgatggtatttgaaggtggggtcttcgagaggtaattaggtcatgaggttggattcctcatgaatgttagtagtgacctagtaagaagggagcagagagctagctcactctttttctaccctgtgagatacaagaagacagcagtctgccacccagagaagggtctttacaagaacctgatcctactggtaccctgatctagacttccagtctctaaaactgaaaataaatttctgttgtttataagtctatggtactttcttatagcagtctcaactaagacactacctgaattttcctccctgatcccagttgtgaccagccatacacatttgtaaatgtgttcatggtagagactgcggccttaagcctataggtgtagatttcatgaacttggtctacctcaactttgctatttttgcagagaagagttgggccgctctatctatttctgtacccatcaccaatctttctatctcccatgtgattcaaaaatcattagtgtctggcagattgtattttccaaacatgactgtgcttatatctcccattttatgtgatcttcttacactgtaattttgacactcctcccattgaatgttagagtttatgtgccctgtccttgaacatggacagaaccttctcattgccatgaccaataaagtatagtatacatgctatgtgatacccaagaatatatcataaaaatgctatgcatttctgtctttggaacacttggtcttggaacccagctccatgcagaagaaacaaactaacccacacagagaagctacatggagattccatgtataggtgttccatccaacagcccagctgagatcccagtcaactgccagcaaaacccaccagacatgttgatcccagcccaagctatctagtcacgctccttgaaatcccacagcttggccccagacatcatagagaagcagataaaccattctcactgtgccccatccaaacccctgacccacagaatctatgagcagaatcaaatagctgttctgtgctattaggttttagggaagtttgttacacagcaacagtaactgaaacactggcaaagcttagacttggcttgcttgcgagccctgaaacagaacatcatattctatcttgagagatattctacggcccacaaaacctctcaaatttccacaatttgcaatcttcagtgagagccagtcggggattgtatgagctcaaagtggctcaagatgaacttggctcttttctgaagcacacattttaaaaagtaaataaaagtctactttatccttttttaaagcaatttttcaatcctttggtgcctcaaaggattgtattatcttacaggaaaaccttaagagggagatatgtcctccttgccttgtacaaatttgaaaggtctcctctatctttaggatgacctcttctacttcttcccactccccttcttctatctacagaagacaagctctcatccagacccacagaagatgatctactaatattttattttgtttatttattttgagacagagtctctctctgtcacccaggctggagtgcagtggcacaatcacagctcactataatctctgcctcccgggttcaagcaattctcctgcctcagcctcctgagtagctgggactacaggcatgcaacaccatgcccaactaatttttgtatttttagtagagatggggtttcaccatgttggccaggttggtctcgaacttctgacctcaaatcattcacctgcctcggcctcccaaagtgctgggattacaggcatgagccactgtgcctggcctgatttaccaatgttttagactaactgaatgcctcaaatactctggagaccactcatagcattcacagtttcattgcttaaatagtcactagaaagagcattcatccttctcccagggccatcaaagctctgctcttgacagagcttcctgacatgaacctttctccatgcacgtatctgaaaaggaaaaaagagaagtcactaattcaggtgattagatcagcctctactcctggagcttgtcccaaagtccacattctgtggagttcagtggtaaacaatgcccatgcacccaagtgcccgttatcaacccaaacaaggaaaaggcctcttcaatttcctttcctcatcaatctgagggaacagacaatacataatttcctcctacatcaggctacagcgaaaacacatcttgttcggaactagacacttactcctaagaatgacagtttgattctaatccacaggagtaacagaaagcaatcaaagcaaaaagcagatgcaaggccctcaaactgccatgccctgaaacagggtcactccagggatcagcttgtcctgagagcaggagggaaacatttgatgaaatgtaggatttctgtggcagcagaaaagacccctgcattatggatggaagtcaccctgggaaaagcaccaaaaatgttcaaaggccaaggaatgatttgtgacaaagagagaaaaaaacaataagcagcattaaaacccaaaattactagctaccaagctggttattgattaccagggtcccatctgaattcagccaaatccttaatcaaagggtttatagatattatgcatgttacagtctacaacagaaaagttactttttccaaaggttttatccacttttggggtcatacttgggcattttcagccacgtttgacttacagaaaagagaactacaccaattgtcacaatattctggtacttggagagagctttaaactacattctggatcaaatggaccaaatagagatttgcagaacatttcatccaacaactgcagaatacccattcttttcaattgcacatggagcattcaccaggatagattatgtgttgagccacgaaacaactcctaacaaatttaagaagatcaaaatcatatcgagtatctttttttaccacaacggtataaaactagaaatcagtaacaggaggaacttcagaaaatttacaaatacatgaaattacaacagcatgctcccaaacaatcactgggtcaatgaaaagtttaaagggaaaatttaaaaaatttttgagacaaatgaaactggagacacaacatactaaaacctatggaatataacaaaagcagttgtaagaggggggcttctagcaattaacatctatattataaaagaatgatttcaaataagcaaactaacactgcacctcaggaaattagataaacaagaacaaactaagagccacccactgtggctcaagcctgtaatcccagcactttgggaggttgaggcaagcggatcatgaggtcaggagttcgagaccagcctggccaacatagtgaaaccccgtctgtactaaaaatacaaaaattagccaggtgtggtggttcatgcctatagttccagctatttgggaggctgaggcaggagaatcacttgaactcaggaggtggaggttgcagtaagccaagattatgccattgtacttcagcctgggtgacaaacagagactccatctcaaaaaaaaaagagaactatctaagcctaaagttcatagaaagaaggaaataacaaagatcagagcaggaaataaattaaatagacactagaaagataatagaaaatatcaatggaactaagagttggctttttggaatgacgaacaaaatcaacaaatatttagctagactaagaaaaaagaaaaaagcaagaagactcaaataaataaagtcaaaaatgagaatgtggtcattacaactgatacaacagaaatatgaaggctaataagagacattatgaacaattatacaccaacaaattggataacctagaagaatcagagaaattccttgggtatacaacccaccaagactgaattatgaaaaactagaaaatctaacagacaaataatgagtaaggagattgaatcagtaatagagtctctcatcaaagcaaagcccagggcatgatgtcttcactgctaaattctatcaaacatttaaagaagaaatattaccaatttttgtcaaactctcctaaataattaaagagcagagaatacctccaaactcatctggacactatgttgtacaaattaaatacatacaattttttctgtcaatgtaaaaattaaaatacaaagcaaattaaagtttctaaaaaagaatattttgttactaaaccaattctattacaaaaaacccacacagtggaacctggtatccactgagggcttctagtccactgagacctctattcaattgcctcatctcaattttccacagactgaggaagtccacagtctaccagattttttgtgaatttctggaatgtaacaatgttcttatggtacctctgacttgagttcatctttcaattcatattgtctcttctaaagcctcccaacccaaagataaaacccagcctcttccccagaatgcacataaaataactactgtcttcaagcattttgtaggaggaagatcaccatgcatcatgtagcaagcagtgttgaagcacatggcaagtgttcccactctgtaaagtctttctcataagcctactacccctaaaatcttcctggctctctgctgttaccttcgactatgggctgggccctctatttgctcctccctcctatctcctcttttctgccgtctttctcttctaaagaacaacttcccacccttccgccactgcattttctcctacagaccatttaaatcatttcttttgttttcaagctcctaaagaaagttagttctgtacctaactgaaatcatgatggcaactagtaagataaggtaagacttgcctctgtatagcagcaacaagaaagacacttctcatcttgttgcttgagtttctcatccctgaaatgccaaggttggattgtgattccccactttggcatttccctgaagcccactggggagccaacattgtgcatgtggaaaagaaatgtcagcatattggcatctgggctaatgaacagatctgctaattatgttttatgtgaaatgtgaaattcaaagaaaacattaggggatattagcattgctaaacacagtcctatgccatttaaaaaaatatgtttattactgctctgccactaatctcttatgaaacttcagaaaattagttaacatatttaagcttcgttgtttttccaatcctgcatttgtaacatgctgcaatcagtgttggtgatttccaaggcacactgcaaccgcattggacaactgtttgatgggaatatgcaaaaggtaaaccaacatgctatgacttatattactatgtttaggtataagcccaatagaaatgtatatatgtgcccaccaaaagacatgtataaaaatattcacagcagcactattcagtatagctcactggtgagatgaatgatgccctccctaaaagatgtatctgcatcttaacccccagaacccgtgaatgtgccctaacttatccttgaagatgttaattaagttatggatattgaaatgagatcatcctggattacctggatgaactctaaatccaataacaagtgttcttatgagagacagaagagatcagggataaagaggaagaagaggagatgatcttgtcaagacaagcagagattggaatgttgcacagccatgaagtgaatggaaccaccagaatctagaagaggcaaggaaggattctcccctagagccttcagaaggagtgcagccctggccaacaccttaatttcagactccaggcctccagaaccgagagagaatacatttctgttgttttaagtcaccaactctgttggtgactttgttgcagtagccccaggaaagaatacaagtcccaaactgaaaactgtccacatgttcattaatagtagcatgaatacaagaatggtagtgtagtcacaaagcagaatactttacagcaacgaaacaaaacaaagagcatggatgaagcttcatcaacaaacaccaacgtggtgttaatgaaggaagccagactcagcgtgcataatgcatgatcttgttcatatgaagttcaaaaacaagaaaagcctcattttgtgagagacgtcagaattggatctaccttttagaaggggcattgatttggagggggcacaagaaagctcactggggtgctggaagtgttctacttcatgatctgggtagtgattacatagcgtgcttgttttgtataaatactttgagttgtatacttaatatttgtgcactttattgtatgtatgttcattttcaaaaagagtttttaaactatgtgtttttaggccgggcatggtggctcatacctgtaatcccagcaatttgggagggtgaggcgggcagttggcttgagcttggaagtttgagaccagcctgggcagcatggcgagacctcctctttgcaaaaaatacaaaaattagatgggtgtggtggcgcatgcctgtagtcccagctacttgggtggctgaggtgggaggttcacttgagcccaggaggtcaaggctgcagtgagctgtgtttgtgccaccgcactccagcctgggtgacagagtgagaccctgcctcaaaaactaaataaaaataattaaactttttttatcttaaaatcttatttacagaattaaatattttgttcatataaacagagaacatttatcagggtttattatatgctttggactaggttagagagaggatggttggctatggtatttatatgaggagcactttgtaaatttaagaccgaattgttgcaaactgatgtagctaaattcatatgttcggtgactgttacaatagttatttaggtttcaaatattcacatctaaatattacaaaaattcctcaagtgtgaattctactttaaagtcattcaaacatgaccttacaaaagcaagttgacatgagctattttatatcccccactctgttcgtggcattcattttagaagcccgtaagctcacctcctccaggggattccccttgcttgcagttacatgtgatataggtgactgtatctacctagtgctgatggattcatctttagtttttattttattcctcacaagtctctgtttacatgctattttataagaagctctaactaattttcatatgtgtatgatacacagcctgtgtaggtcttaagtatttttagcattcaggcatcaagacaagagcttcaggtactgatgtccaaattgaaggtgggttcatatgttataataataaataatgctagtagttagttataataataaagcagtttgcttgctatctcgtgaactgtgaatttttggctgattggacataggagagtgtctaccaaaatcaactatgtattgaaataattaatatgagcctttctttctggtagaaaaaaattattttgctactccagatgtacagccttctagattcagttatcaccaattaagctcaaaatgtaagaaattgaatctggttttctcagaacttgcttctgcttcccgaaagccaagtaagtgattaaacaaacagttcagttaattgaggagtttgagaaactctgtttctgttctgttccatgtatggaaattcctctcttgccctcttgtagctttacattttcatcaaaataacatcaaaaaggatactataaattaaaatttccaaacttttagctttttttgcttgtttacctgaagctccagtccttcccaattagaactttataacagtgggcactgcccctggacacattttcagatgtagtcttggtattcagaggactttggcaagaaagtggctgccagtgactattaagaggcataaccactttgcttggcacgatgggttataatgtgtctctggggtgctaggatagcctatcttgagtgggcgattaaagagtatgtgtcagtatttgtagaagggttgttcctaaagaactagagtgcatgccacatgggcacgtgggagcagatggaccctcaagcggtccaatcccttgagtcctaaggtttttttattattattattattatactttaagttttagggtacatgtgcacaacgtgcaggtttgttacatatgtatacatgtgctaagttttttttaaatcagtccatgccctctatgatttttttaagccactacttattgaacacctcctaggttccaagcactgtccccatggctttatttgtgttgtctcatctaatttccgtagctgatgctgcagtgtcctgtgcatatacctaaacacccaccatcctttacacactgtcagcttcctaccaaaatcacatgcatctctctatttgggttttttttttaattctttggccataggagcatgataaaccatgcatagatcagaccagatgtgctggagagttaccacccttgaggtcatctcccagccaataatagacaggacatgatgaacaatatcctagcttcccagcctttcaggtgggacaaatcttgagcgtgttctgtaatgtctcctagaagtctcagcaggctttttgccccagtgccctcagcatatcctgtccactcatgcactctatgttgacttccttcgtcctctgtctcactttctacctccctactctcccagtttcttgagatcaccctgcagataatccttgttttgagatgagcttctgaagggagaaaaaaataagacaatcttcatacacttttgataaaccatttttattcccattttatagacaaggagactaggactcaaagtgctgtggactgagtgtgctcccctcaaattcactgtcgaaatcctaacccacaatgtggtggtattaggaggtggaatatttagtgggtagttaagtcctaagggtggagcccacatgaaagggattagagtccttataaaagagaccccagagagctccctcaccctgttcctccatgcagggacacagtgaaaaggcaaatgtctgtgaaccaagaagcaagacactgaatctgccagagccttgatccagcactttccaacatccagaactgtgagcaataaacttttgttgtttctaagccactctgcctatggtatactgttatagcagtcttaatggaccaagacacagagtaattaagtaacttgcccaagatcgtatcactaataagtaggagaactggattcagtttcacctatacctgtagtttcactacagcacactgccttatacaattaaaagagttacttttccgtggagatggcacacagatatggattcatggacacaaacatctagaatctgcacgttctttcttactaaactgattttccagtttttacatcttcacggggaattttcttgtttcttgctcatttgtaacatagtaagtttggttgcagctttgtgcatgatgcatacatggtcgcccagttaaggtgaccacaatcttatattatcacaatattctatacatggcatgctggctagcttccctgtctcctgaagatctgctgtctaatccccttcactctactctctgttgccctataaaactgacaaaatcccacacgtgagcaagaagtcatggaacccaaaggtcccaagttctgctttttccaatcatactgtggtagtaactgaaatcagtttttcaaaagagtcaaaattaggtagtgggatatgatgagcaaataccttttggatccttgatataaaaacaaaattctctgtttcatattgtaataaaaatgcatttaaaaggagttaaagaaaaatatgaccaaagagagagaagtctgcatttttagatgccccagaacagaagcacatgttaaaatgtcatatttttcaagttctcaagataaaaagtagggctgaatgcttaaaagtacaaaatgggtatttttagctgtggaaatgcgtaatggaaaaaaaacagatatggggaaattgataaggtaagcagaaagagagcaaatatccaagtaaatacaggacatttgcatgagcagagccagggagaggaaagaggaattagaaggtaaagaaaaaataaagtcattttttacaggctccatagattatgccaaaagaaaaaagggaattctggcagggtgggtggggggaggggtatgactcttaacaatgtccttccttgtttaataaaattttacccacattgaaggctcagatccacagccttttcctcaactaactgacattgtcttagttaactaataactttgggattcacttttccttgtctttcaaaataatgtccaccttcttagttttagatgagcactttgaagcatgggtacctctctggcttgccttccagccccactcaaacacccaatcctctggtatagtccttttgcatattgtcaattctatataggggtcatgcaatgcttgacctggtccattccctcaccacctctcatcccatccatctggtttacacccacttgttctttaagaacaaccaatgagccaaggcaggggggttgactgaggccagaagttcaagaccagcataggcaacatactgagaaccccatctctacaaaaataaaaattagccaagcatggcagtgcatgcttgtagtcccagctactagggaggctgaggcaagaggatcactcgagcccaggatttcaaggctacagtgagccatcatcacaccactgcactccagcctggacaaaagaccctgactcataaaaaaaataataaaaattaaaaatttttttaaaaaagaaaaaagaccaaccaatgacatattttatgttaagtctccttattagctgcactcaacaagccctgtaccatcctaagtggaggttaatatagagattatcacatgggatctcaattgcctgtttactgctcactctcattcaataaactagaaatttcttaagggtgtcaggctgtatttcatttatttttgtgtatccagagcttgactgagacacttaaggaggtagcaggggattcatgttaaactgaatcaaattaaatatgttaaacatgatatttgattgaatagatttctaaagtcttccttggctccacagttccctaattctttgtcccaggaggtttccagacatcattttggatatttgtccttagatgtctcaacatgaggtaaagtaaggcaagtggggttatacaaattgtacccaatataacagagtcaccaacaggccaatatctgtgtagccgccacagcccagtaagcctggcaaagctcaaacaggatctctttttaatgaatctaagtggatgcttcacacaatcaggtttaatttttgtggattagtacttattttatggcgatggtaggctgaatcacctgcttttctcagatgtgtgcctttcagatggcccaggctggcagagggtccagcactcagctcacaggaaactgggtcgcctatgatacgatgtcacatcttttaagatttggcagtttgggagggagcgggttgtgcacagcaatcagatggaatttactgctagtagatggcgatttgttgcattttgcattctccgttgtacaatgtctttgattgctagcactgccatttcaggtttgacatctttctatggggaacatctgtggcatgtagcattttcctccgtactgacaagaaagcagacaagacactgctaattttttaaaatcacatgatacagtgacatatacagtaacagttatgctgtatctaggcttgaattatttttcaacattatttgacagctactagtttcttatctggctgctttctctaagttgttgggtttttttatttttatttttttattttattaatattatactttaagttttagggtacaagtacacaatgtgcaggtttgttacgtatgtatacatgtgtcatgttggtgtgctgcacccagttgttggttttttttgtttgtttgttttaaacttacatctttgtgtcaacctggacttcctggactctgatctgaggctaaaatgatagttttatttttctcatttcctctggggacatggccttttaaatgtggcccccagccatgcagaaaagccacaaaagggtcatcagggcccattcttctcccagccctcccatttcttctgtacgttttccttttgatgtttactgttataatctccatctcaaaatctaccatggtttttgtggtgttccaggttgtcccggataggaagcatggttcggcaaaccggtctacaccaaacctcagtcattttgtgcttgaattcctttcctttcctgtcatacacaatgaaattatctctgtgtaattactctcaattaggagtagcatcaaatgagtccctactggaaaaatttcaggcatcaatggtagttttggggaatgaaggattaaaaagtcttccacatacctccaaataaaactggtcctaccttttcctacagtacctgatgtgactatagagcactgaactggctgtccaaatattggttctagttaatacactacaatgctgtgggaccctgggcaggatgactgaccactttggccacagttttctcaagtgtgaaagaagcgaatgtatattaaatggtaaacacattgcttacagatccaaaatgccacatagtagtgaatggaattttcgagaacatttcaaaaactttcccacactttgacataagatgacaaaactaatgacaaggcaactcactctggagatttattataataatgacattctatttgttttctaccaaataagacataaatacaacaaaaaacaaacaacaaaaataaacatagaatacaggtctcattgtggtgtagcaatttttttcccaccaatattttggtcgagattattttaattgttacccattttgtaccagactttgtggattttttggtaagatattcctaagaaaaatagtatctccttggaagtttggtttctggtgatatttatttcagtttctaacataagatatgtgttggcttagaccaggcactgccatctttacagctatgtagggtattggattccgtgtgacaaattatgacaactcattctctgacattcctcccatgcggaaatgaggtctgtgttctcctctccctgatctgggcaagctctgggactcctttgagtaacagaatggagcagaagcgacacaagatgcccccagacccatcccataagacactggcagcttctacttcctgtctcctggaacactcactctaagactgctcttcccaaggaaaccttgctgtcatgtaagaaatagaagtgtgactgccctgaggccaccatgccattagaagcccaagccacataaagaagcttttgatgaaacaccatgtgaaaagagaaagaggccaagggatactaacacacgagacatgtggatgaagaagtcatctgtgatctgattgctctagcccctgcagctccagctgatgtcacatgaaccagagaataagcacttagccaaactcttcctaaattcccaactctcaaaaacatgggcaaaataagatgtttaaccactatgtgcggagtagattgttaaacagaaatgggtacctggaacgagccaccaggacctctgagaaagatgacagttctcctttttatgcaaaaattatgagtggttaagtgtaaatccatgaccttctgctacaggcaaaaacagctggccctgtgaccaagagcctcttttagtgggaatcaacaggacactgctccttcataaagtcaaatatttgcctctgctaatgaagctgtggaggctctcttttaccaattgtttggaagagcttaatggatctaaaatctcaggtggagtgtgtttggacagaaatgtgggtaacgttctttgagcagtgttgtaaaagcatgaatcagcagaacaccacttcacttgagaacaggatttggggagtagaaataactgataaagcatcacagatggccataagtaaccttcttctatcctaggatgccccgtgatgcactctgttttgcagtgcagaacctcattgctagacttcattttggaactagaggaattttggccagcttgagcctatgctataattatttttatagttctttctatgttgcttttttctctctacttaatttgtgggagtaattccttctagttgccagttttgggggcttgtaaaatttattagctgttcgctattgtgaatagtgctgcaataaacacacatgtgcatgtgtctttataatagaatgatttatatttttctggttatacacccagtaatgggttgctgggtcaaatggtatttctgtttttagatctttgaggaattgccacactgtcttccacagtggctgaactaatttacactcccatcaacattgtataagcgttcccttttctcctcattcttgccagcatctgttattttttgactttttaatcatagccattctgactggtgttggatgatatctccttgtgggtttgatttccatttctctaatggtcagtgatattgagagatattgagcttttcttcatatgattgttggctgcatgtatgtcttcttttgaaaagtgtccattcatggccaggcacagtggctcacacctgtaatcccagcactttgggaggccaaggcgggcggatcacgaggtcaggagatcgagaccatcctggctaacacggtgaaacaccgtctgttctaaaaatacaaaaaaattagcggggtgtggtggtgggcgcctgtagtcccagctacttgggaggctgaggcaggagaatggcatgaacccaggagggggagcttgcagtgagccgcgattgcaccactgcactccagtctgggtgacagagtgagactctgtctcaaaaaaaaaaaaaaagtgtccgttcatatccttggcccactttttaatggggttgcttgttttatagttgtaaacttaacttccttatagatgctggatattagacttttgttggatgcataatttgcaaaaattttctcccattctgtaggttgtctgtttactttgttaatagcttcttttgatgtgcagaagctttttggtttaattagatcccacttgtcaatttttgcttttgttgcaatagcttttggcatcttcatcatgaaatctttgcccattcctatatccagaatggtaatgcctaggttgtcttccagggttttcatagttttgtatttcacattaagtctttaactcatcttgagttaatttttgtatgtggtgtaaggaaggggtctagtttctatcttctgcatatggctagccagttaccccagcaccatttattgaatagagaatcctttcccctattgcttgtttttgtcaggcttgtcaaaaatcagatagttgtaggtgtgcggtcttatttctgggttttctattctgttccattggtctatgtgtctgtttttgtaccagtaccatgctgttttggttactatgaccctgtaatatagtttgaagtcaggtagcatgacgcctttagctttttttctttttgcttaggattgtcttcattattcagggtctttgctagttccatatgaatattaaaatagttttttctagttctgtgaagaatgtctgtcaatgatagcttaatagaaacagcattgaatctgtaaattgctttgggcagtatggccattttaataatattgattcttcctatccatgagcatggaatgtttttccatacctgtcatctctgatttctttgagcagtggtttttagttctccttgtagggatctttcacctcccttattagctgtattcccaggaattttattctttttgtggcaggtgtgaatgggagttcctttctgatttggctcttggcatgtctgttgttggtgtataggaatgctggtgatcttcacaatagcaaagacatggaatcaacctaaatgcccatcagtgatagacaggataaagaaaatgtggtacatatataccacggagtaatatgtggccgcaaaaagaatgagatgatgtcttttgcagggatgtgaatggagctgaaggccagtatccttagcaaactaacacaggaacagaaaaccaaatactgcgtgttcttacttgtaaatgggaactaaatgatgagaacacatggactcatagaagggaacaacacacactggggccttttggagggtggaagttgggaagagggagaggatcagggaaattaactaattggtactaggcttaaaacctgagtgatgaaataatcaacaaacccttatgacacaagtttgcctatgtaacgaacctgcacttgtacctctgaacttaaaagttaaaaatatgatcagctctttttgatttgttttttaattaatagactttttgatagagttttaagtttgctgaaaaaaattgagaagtagagttcccgtatacccctcaatctccaccaatatatttttaatatcttgcattaatgtggtacatgtgttaaactgatgggccaatattgattcattattattacctaaagtccagagttcacattatggtttagtcttttgttgtacagtctaggggttttgaaaaatgcataaagacatatccactattatagtatcataccgttttaggtttacaaaattagggcaaagatagtacagagagtttctgtatatctcacaatcaatttagctttttataaacatcatacattattatggtgtatttgtcacaattattgaaccaatattgatacttattatctgaagtctattctttattgatttccttagtttttacctaatgtcctttcttcttcttgtttcaggataccacattacacttagtcttcacatctccattagcttttcttggctgtgacagtttctcagacttttcttgttttgatgatcttgaaattgttcagtattttgtaaaatgttcctctcttggcatttttcatcattaaactaggataatgtgttttcagggaggaaaacctcagaggtgaagtgctattctcatcacatcctatcaaggaacatactatcagtgtgattcatcactgttgacattacctttgatcatctggctcgaaatatctttgccaggtctttccactgtaaacttacccattatatctccctgcttttccgtactgtactctttggaagaaagtcactatgtaaaggccacacttaaggactagtaaactatgctttaccttcttatggaaagaatatttacagaaattatttagaattctttggtgcaggaaatgtatttattctctctcatttatttgtttattcatttctttatattcatatggattcaaggacttttattttattttatatgttggattataatccaatgctacttgattgattgctcaaatttttgcaactttgaccattgggagctctttcagttggctactgtgcaccttggcataccccatccttataggtttggattttttgttttgctttgtttctttttcatcacttccttactttctgcactgcaagatgctctaggttatcttgtgtattttattccccagtcctagaatcagctatttctccaggaaccctttgttatttttacaggagaatgatattagaaaccaaaatctggacactaacttgctcactactgctgagatgccattgcttctgcttgctccctgtggaaagagatatatgtgtatatactaacccatgtatgtaaacatatctataaatatttctatatgtaaccatctgtgtctatattgacctaaacataagttcatacttatgtcaatactaatccattaccatatggattgttctagtctctttctacttgcttatctataatctttaacaccaataatgagaaacacagatcccattatttgccatccattacttgtttacttctagtatacatgtgtagcagtttcagaattgttaacctatgcctgtacagaaaataactttataagttagagcacagttttaatgtacagttccttttgcctttagttttacaggctccatcatttccaaagttttccttggtttatcattttacccaacctctttcagtgagatttcatatattcatacttagatatttttatgacattctgcattgtatcctgggatcccctgaactcctaaattatttttaaaatttgtatactttaatatttaatcattatgctgtgaagttctgtgagttttcaaatgcttaatgccttgtatttaccattacagtatcatacagaatagtgtgactcccctataaattcccctgttcttcacctgtgcaacctctgaaatccctggaaattactgatctgtttgctatctctacagtttgccttctccacattgtcatccagctggaatcactcagtatacagctttttcagactggcctctttcacttagcaatatgaattttaaatttattgatctttttggtagtttgaacactcacttatttttattgctttgtaatattctattgtgtctatgtaccagagtgtgtttatgcatttacttcttaaaggacgttttctttgctttcacttttgggctattttgataaaactgttttaaaaactcacatgctggttttatgtggacctaagtttgcaaacttaaatacataggagcattatttctagattgtttggtaatctttgtagccattttgagaagttgctgtatcattttcccattcccaccaatgaatggaaatttctgttgctccacatccttgccagtagcaggtattgccgtttcatttttcactttgctttgcttttgtttttgccattctaatgggtgtgtacgtagtcatatcttatcattttgttaatttgcaattccctaattatagttagttaagcatttttcatatgctaattagccatctacatatcttctttggtaaggtgtctgttcagatattttgtccacttttttacttgaattgtttggtttttatttttttgttttgtttttgttttattattattatactttaagttttagggtacatgtacacaatgtgcaggttagttacatatgtataaatgtgccatgctggtgtgctgcacccattaactcgtcatttagcattaggcatatctcctaaagctatccctccccgctccccacaccccacaacagtccccagagtgtgatgttccccttcctgtgtccatgtgttctcattgttcaattcccacctatgagtgagaatatgcggtgtttggttttttgttcttgcaatagtttactgagaatgatgatttccagtttcatctatgtccctacaaaggacatgaactcatcattttttatggctgcatagtattccatggtgtatatgtgccacattttcttaatccagtctatcattgttggacatttgggttggttccaagtctttgctattgtgaatagtgccgcaataaacatatgtgtgcatgtgtctttatagcagcatgatttatagtcctttgggtatatacccagtaatgggatggctgggtcaaatggtatttctagttctagatccctgaggaatcaccacactgacttccacaagggttgaactagtttacagtcccaccaatagtgtaaaagtgttcctatttctccacatcctctccagcacctgttgttttctgactttttaatgatcaccattctaactggtgtgagatggtatctcattgtggttttgatttgcatttctctgatggccagtgatggtgagcattttttcatgtgttttttggctgcataaatgtcttcttttgagaagtgtttgttcatgtcctttgcccactttttgatggggttgtttttttcttgtaaatttattggagttcattgtagattctggatattagccctttgtcagatgagtaggttgcgaaaattttctcccattttgtaggttgcctgttcactctgatggtagtttcttttgctgtgcagaagctcttgagtttagttagatcccatttgtcaattttggcttctgttgccattgcttttggtgttttagacatgaaatccttgcccatgcttatgtcctgaatggtattgcctaggttttcttctagggtttttatggttttaggtctaacgtttaagtctttaatccaccttgaattaatttttgtataagtgtaaggaagggatccagtttcagctttctacatatggctagccagttttcccagcaccatttattaaatagggaatcctttccccattgcttgtttttctcaggtttgtcaaagatcagatagttgcagatatccggcattatttctgagggctctgttctgttccattgatctatatctctgttttggtaccagtatcatgccgttttggttactgtagctttgtagtatagtttgaagtcaggtagcgtgatgcctccagctttgttcttttggctcaggactgacttggcgatgcgggctcttttttggttccatatgaactttaaagtagttttttccaactctgtgaagaaagtcattggtagcttgatggggatggcattgaatctacaaattaccttgggcagtatggccattttcatgatattgattcttcctacccatgagcatggaatgttcttccatttctttgtatcctcttttatttccttgagcagtgggttgtagttctccttgaagaggtccttcacgtcccttgtaagttgtattcctaggtattttattctctttgaagcaattgtgaataggagttcactcatgatttggctctctgtttgttattggtgtataagaatgcttgtgatttttgcacattgattttgtatcctgagactttgctgaagttgcttatcagcttaaggagatttcgggctgagacaatggggttttctagatatacaatcatgtcatctgcaaacagggacaatttgacttcctcttttcctaactgaataccctttatttccttctcctgcttaattgccctggccagaacttccaacactatgttgaataggagtggtgtgagagggcatccctgtcttgtgccagttttcaaagggagtgcttccagtttttgcccattcagtatgatattggcagtgggtttgtcatagatagctcttattattttgagatacgtcccatcaatacctaatttattgagagtttttagcatgaagtgttgttgaattttgtcaaaggccttttctgcatctattgagatgatcatgtggtttttgtctttggttctgtttatatgctggattacatttactgatttgcatatattgaacctgccttgcatcccaggattgaagcccacttaatcatggtggataagctttttgatgtgctgctggattcggtttgccagtattttatcgaggatttttgcatcaatgttcagcaaggatattgttctaaaattctcttttttggttgtgtctctgcccggctttggtaacaggatgatgctggcctcataaaatgagttagggaagattccctctttttctattgattggaatagtttcagaaggaatggtgctagttcctccttttacctctggtagaattcggctgtgaatccatctggtcctggactctttttggttggtaagctattgattattgccacaatttcagaggctgttattggtctattcagagcgtcaacttcttcctggtttagtcttgggagggtgtatgtgttgaggaatttatccatttcttctagattttctagtttatttgcatagaggtgtttgtagtattctctgatggtagtttgtatttctgtgggattgttggtgatatcccctttatcattttttattgcgtctatttgattcttctgtcttttcttctttattagtcttgctagtggtctatcaattttgttgatccgttcaaaaaaccagctcctggattcattaattttttgaagggttttttgtgtctctatttccttcagttctgctctgattttagttatttcttgccttctgctagcttttgaatgtgtttcctcttgcttttctagttcttttaattgtgatgttagggtgtcacttttggatctttcctgctttctcttgtgggtatttagtgctataaatttccctctacacactgctttgaatgtgtcccagagattctggtatgttgtgtctttgttctcgttggtttcaaagaacatctttatttctgccttcatttcgttatgtacccagtagtcattcaggagcaggttgttcagtttccacatagttgagtggttttgagtgaggttcttaatcctgtattctagtttgattgcactgtggtctgagagacagtttgttatatttctgatcttttacatttgctgaggagagctttacttccaagtatgtggtcaattttggaataggtgtggtgtggtgctgaaaaaaatgtatattctgttgatatggggtggagagttctgtagatgtctattaggtccgcttggtgcagaactgatttcaattcctgggtatccttgttaactttctgtcttgttgatctgtctaatgttgacaatggggtgttaaagtctcccattattaatgtgtgggagtctaagtctctttgtaggtcacttaggacttgctttatgaatctgggtgctcctgtattgggtgcatatatatttaggatagttagctcttcttgttgaattgagccctttaccattatgtaatggccttctttgtctcttttgatctttgttggtttaaagtctgttttatcagagactaggattgcaatccctgcctttttttgttttccatttgcttggtagatctttctccatccttttgttttgattctatgtgtgtctctgcacgtgagatgggtttcctgaatacaacaccctgatgggtcttgactctttatccaatttgccagtctgtgtcttttaattggagcatttagtccatttacatttaaagttaatattgctatgtgtgaatttgatcttgtcattatgatgttagctggctattttgctcgttagttgatgcagtttcttcctagcctcgatggtctttacaatttggcatgattttacagtggctggtaccggttgttcctttccatgtttagtgcttccttcaggagctcttttagggcaggcctggtggtgacaaaatctctcagcatttgcttgtctgtagagtattttatttctccttcacttatgaagcttagtttggctggatatgaaattctgggttgaaaattcttttctttaagaatgttggatattggcccccactctcttctggcttatagagtttctgccgagagatccactgttagtctgatgggcttccctttgtgggtaacccgacctttctctctggctgcccttaacattttttccttcatttcaactttggtgaatctgacaattatgtgtcttggagttgctcttcttaaggagtatctttgtggcgttctctgtatttcctgaatctgaatgttggcctgccttgctagattggggaagttctctcggataatatcctgcagagtgttttccaacttggttccattctccccgtcactttcaggtacaccaatcagacgtaaatttggtcttttcacatagtcccatatttcttggaggctttgtccatttctttttattcttttttctctaaacttcccttcttgcttcatttcattcatttcatcttccatcactgataccctttcttccagttgatcgcaacagctcctgaggcttctgcattcttcacgtagttctcgagccttggctttcagctccatcagctcctttaagcacttctctgtattgtttattccagttatacattcttctaaatttttttcaaagttttcaacttctttgcctttggtttgaatttcctcctgtagctcggagtagtttgatcgtctgaagccttcttctctcaactcgtcaaagtcattctccatccagctttgttccgttgctggtgaggagctgcgttcctttggaggaggagaggtgctctgctttttagagtttccagtttttctgctgttttttccccatctttgtggttttatctacttttggtctttgatgatggtgatgtacagatgggtttttggtgtggatgtcctttctgtttgttagttttccttctaacagacaggtccctcagctgcaagtctgttggagtttgctagaggtccactccagaccctgtttgcctgggtaccagcagcagtggctgcagaacagtggattttcctgaaacacgaatgctcctgtctgatcgttcctctggaagttttgtctcagaggagtacccagccatgtgaggtgtcagtctgcccctactggggggtgcctcccagttaggccgctcaggggtcaggggtcagggacccacttgaggaggcagtctgcccattctcagatctccagctgcatgctgggagaaccactgctctcttcaaagctgtcagacagagacatttaagtctgcagaagttactgctgtctttttgtttgtctgtgccctgcccccagaggtggagcctacagaggcaggcaggcctccttgagctgtggtgggctccacctagttcgagctttgtttacctaagcaagcctcggcaatggcgggcacccctcccccaacctcactgccgccttgcagtttgatctcagactgctgtgctagcaatcagtgagactccgtgggcataggtccctccaagccatgtgcgggatataatctcctggtgtgcccttttttaagcccgtcggaaaagcgcagtattggggtgggagtgacccgattttccaggtgccatctgtcacccctttctttgactaggaaagggaactccctgaccccttgcgcttcccgagtgaggcaatgcctcgccctgcttcagctcgcgcatggtgcgctgcacccactgtcctgtgcccactgtctggcactccctagtgagatgaacctggtacctcagatggaaatgcagaaatcacctgtcttctgcattgctcatgctgggagctgtagaccggagctgctcctattcagccatcctgttttttattgttaaattttaagaggtctttgtatattttggacacaagttatttatcagataagtgttttataaacattttctcccagtctgtggcttgtattttttctctcaaaatagtctttttcacagaaaataagtttttaattttaatgaagtccaaagtatcattttttgtgtgtggattatgctattagtattgcatttaaaacctcatctccaaacctaaggtcatgtagattttttcttatgttttattcaagaagttttacaattttgcattgtacaattacatttattgtccattttgagttaatttttttgtggggtatatgtggttttggtgttagggtaacaatagcctcctagagtgaagtaataagtattacttctgcttcaattttctcaatgctattgtggaaaattgatatcatttctcccttaaatatttggtaaaattcactagtgaaacaatttgggtctggttattgattcactttacttaatagacacagggctatttatattatttatatctccttgtgtgaattttgggagtgtctatgatggaattggtccattttatctaaattgtcaaatttgtaatcacagtgttgtttgtagtattcctctcttatcctttcaatgtccatcctttatttctgatattggtaacttttcctcttctctctcttttttcttggttagtctggctagaagtttaccaatttattgatttgttcaaaggaccagcttttggtttgttagttttttctattattttcctgttttcaattacattgatttctgctctattttttccttctgcttgctttaggtctgaattcctcttcttttcttgtttcctatggttgaatattaagttattcattttagatattttttattttctaccatatgtagttaatgctatcaaatttcctctaagcattgcttcaggtacatcccacacattttaataagttgtatttttattttaatttaaagtatttttaaatgtttcttgtgacatcttgactcatgtgttatatagatttgtgttgtttagtctccaactatttggtgattttccaagtatgtttctattattgatttctaatttaattctattgtggtctgagaacatgctttgcatgttttctactcttttaaattttgaaatgtgttttatggcttagaatgttggctatgtctgagaatgttccatgtgagcttaagaagaatgtgtattctactatggttggatgcagtattctatgaatttcaatagagcaagttgattataatgctgttcaggtaaactatattttgttgctatttctgcctgcttaatctctcaattactgacaaggggtattaaattctccaagcataatagtgaatttatccctccttcagttatatgagttattgcctcatgtattttgatgatctgtttttagatacatacatgtttagaattgttatatcttcttcaaaaatttacccattcataattacccagtgctgctctttatctctgacaattctccttgttttgaagtctgctttggctgaagttaatattttcattccagttttctttcgattagtatggtttctctttctccattgtccatttctttaattttagcttatcggagtctttatatttaaagtgaattttatgtaaacaacatatacttgggtcttgcatttttatctgacaatctctgtcttttagctggtatatttagactactcattccaagggattattcatatatttgctttaacatcaaccatgtttgtagttgttttatgctttccgttgttttaattaagtctctgtattgttccattttatctcctctcttattcacttcttttttttttttttttttttttttttttttttttttttttttttgagacggagtctcgctctgtcgcccaggctggagtgcagtggcgggatctcggctcactgcaagctccgcctcccgggttcacgccattctcctgcctcagcctcccaagtagctgggactacaggcgcccgccactacgcccggctaatttttttgtatttttagtagagacggggtttcaccgttttagccgggatggtctcgatctcctgacctcgtgatccgcccgcctcggcctcccaaagtgctgggattacaggcgtgagccaccgcgcccggcctcttattcacttctttaaaaaaaaaaaaaaaaaaaaaaactgtggttgccctaaagcttacaatatacatttttagctaatctgattccaccttcaaattacatgcttctgctttatgagtggtgcaggtacattgaaaaaatattcccaatttctccctcccatcccttgtgatgttgctgtcatttaatttcttttattctatgttataattacccagtacattcttactattattaaattatacagttacattttagaataataaaaatgaaatattttattccattttcattgattcctttttccaagattcttcatctctctttctttaaatagacaagtctcactttgtcacctaggctacagtgcagtggtgtgaccatagctcactgcagccttgacctcccaggctcaagtgatcctcccacctcagcctcccaagtagctgggactacaggtgcatgccaccaggcccagctaattttttaaaattatctgtagagatggggtcttgctatgttgccaaggctggtcgcaaactcctggtctcaagcaatattcttgctttggcctcccaaattgctggggttacaggtgtgagccaccacacctggctctctctctatatatatattcatgtatatgttgcttactgatagtgatacattctggggaattcacctttaggcaatttcatcgttgtggaaacatcacaaaatgtacttaaacttaggtgatataacctactacacctactacacatcgagggtgtaggatatagcctattgttccttgactacaaatctgcacagtatgttagtgtactgaatgctgtaggcaattacaacaacatgatgtttctatatctaaacatatataaacatttaaaaagtacagtgaaactatggtacaaaaactaccattggccccaattacttaatgggacccagcaatcccattacttgctatatacccaaaggaatagaaatcattctaccaaaaaggcaccagcatatatatgttcattgcagcactatacccaaagcaaagacatggaatcaacctagatgtccatcattggtggactagataaagaaaatatggtacatatacatcatggaatactacacagctataaaaaacaatgaaatcatgtcctttgcagcaacatggatgcaactggaggccattatcctaagtgaattaacacaggaacagaaaaccaaatactacatgttctcacttataagtgggagctgcactgagtacatatggacacaaagatggggacaatagacactagggtctacttgaggttggagggtggcagggatagtgagggtcaaaaagctacctatcaggtactatgctcaccacctgagtgatgaaatcatttgtacaccaaaacccagtgacacacaatttacccctctaacaaacctgcacatgtacctcctgaacctataagttgaaaagaaaatacagtataaaagattttaaaatggtacacctgtataggacactcaccatgaatggagtttgcaggactggaagttgctctgggtgagtcagtgagtgagtggtgcatgattctgaaggcatggatattactatatactactgtacacttgataaacactgtacacttaggctacactaaatttatgaaaaagttattttttcttcaataataaactaaatcttagcttactgtagctttttaacttgatacacttttaatttttttttttactttttggctgttcatataataataacataacttaaaacatgaacatattatacagctgttcaaaaatattttctttctctttatccttattctataaccttttttctattttcaaaatttttaatttttttaccttttaggccttattgttaagaattaaaacacaagcacgcacattatcctaggcctacacagagtcaatatcatcaatatcactgtcttccacctcttgtcccactggaaggtttttaggggcaataacaggcatggagctgtcatctcttatgataataatgacttcttctggatacttcctgaaggacctgcctgaggctgttttaagttaactttttaaaaaataagtataaggactatgctctaaaataacaataaaaggtatagtgtaataaatacataaaccagtaacatagtcttttattactactatcaagtattatatactggtggccaggcacggtggctcacacctgtaatccgagcactttgggaggccgaggcgggtggatcacgaggtcaagagatcgagaccatcctggacaatatggtgaaaccctgctctactaaaaatacaaaaattagctgggcatggtggtgcgcgtctgtagtcccagctacttgggaagctgaggcaggagaatcgcttgaacctggcaggcggaggttgcagtgagctgagatcgtgccactgtactccagtctaggaacagagcaagactctgtctcaaaaaaaaaaaagtattatgtactctacataattgtacacgatagaccttagtacaactggtaacacagtaggcttatttacactagcttcactacaaacacatgagaaatgcattgtgctataacattaggatggctatgacttcactaggtaataggaatttttcaattccattataagcttctgggaccaccactgtatatgcagtctgtccttgactgatacatccatatgcagtacatgcctgtagattcaagattctgacctatgttatttccttcttccttaagaacttattttaacatttattgaagcacaggtctgctggggataaattccatcaatatttgtttgtctgagaaagttgtatttgctccttcacttttaaaggatattttcattgggtatagaatgctagatttttgtttgtttgttttgatttgttttttatttttagagacggggtcttgctatgtgggccaagctggtcttgaactcctgagctcaagagatcctcccacctcgacctcccaaagtgctgggattacaggcatgagccaccacacccagcatactttgtttttttaattaacaataatttaaatactgcatgccactctcttcttgctttcatgacttctgatgataaatgtgatgtaattcttatctttactcttctgttgatatggtggtatttttctctggcttcttttaagatttttcttctttgtctttgattttctgtgggttaaatatgatgcacctaaatgcagagctttggttttggggctttgtttttatttattctgcctgatgatctctgaacttcttggattgatgtaggccattaactttggaaagttctcagatattattagtttaaatctttcttctgttctgctgtctctttattcttctagtatttcagttacatatatattacatcttgtgaaattgccctatagttcttggatgttctgtttttattgttctttttttctctttgcaattcagtttggaaggttggtattgacctattttaaagttcactgattctttccccaaccttgttacgttcattcatgagtccatcaaaggcattcttcagttatgttacagtgcttttatttctagcatttcttttgagttctttcttagaatttccatctttctgcttttaccatccatctgttcttgtatctaatcttgtctactttttccattagagccctttacatattaatcatagtaattttaaattccctatctgataattccaaaatctatgtctcatgagtctggttctgatgcttgctttgttttttcaaataatgtttttctttctctttggtatgccttgtaattttttgttgagtgatggacatatcatatcaggtaataggaaatgaggtaaacagtcctgtagtgtgaagatttatgttactctgattaggagttgggttttgtttaatgttctctatagctccagggccagaagctttaaattccttagtttctcatgatttctatttctctccccttgccagagccacaaggggatctttctcagttcttcactatgagaacctggtgggtttcctctaggtcaagttcacaaaagtgaaagggcccccttaagacctgggaatttcttcttctcatgctagtcttatactcagcctccagagatttgtcaattttaccatttaagtgttttttaacatttaaccagtttacagttttcaacttctgctctaggtaagcagatctcatctgtgactctcagtctcagcattcacctttcactacagacttttgggtggtgaatttgccctgaaaagtcagtttgcagtgaaactcttgtgaatatacaaatctacagtgtcaaccaatacagtgaacttaaccaagaaattgttctaataatttttttctgttcattaaagcagatattattcaggcactatttttagaaatttagtaggaaaataataattcctataaaaacatatggatgtatattcaatttaaataaatctaaatgtgctcagagagaacattctttaaagagaagttttattactcaccaaagcctgaatacagtttcccttgagaaaaaccatgggaatcctataaactaaatgacttccaaagggcttacctgatcatttctttctttcctttttttttttttctttgagacggagtctcgctctgtcaccctggctggagtgcagtggcacaatctcggctcactgcaacctctgcctcccaggttcaagcaattttcctgcctcagcctcctgagtatctgggattacaggtgtgcaccaccacgcccagctaatttttgtatttttagtagagatggggtttcaccatgctggtcaagctggtctcgaactcctgacctcatgatccgctcgcctcagcctcccaaagtgctgatattacaggcttgagacactgcacccggccttacctgattatttctaaggctgaattataaaagaaaaaataatacactgttacatatgaaaggtgcccccctttaataaactagctttaagtttattgtgcctttaattgccatttcactcaataataaaatcaaaagtgataacagagaacaaaaaacagtaggcttttccatttcagaaaattttctttttctttgaacctactaatgagtaggaactttggaattattctgtatatgcacatgaaaagacaccctggagatgctgtctatgagagaacaatggacatcttgttgacttaacttcccaagacttcaaggaaggaatgaggaattgaaattgctgtttattctctattctatgtattggctttgagccactgacaattgagaaagttacatggatatataatttttttaatgtctgtctcagcagaaatagaaatcaaaaaagcaaaaggtagtctgtgggaaatagacgctgggaaggacacctcaggaagatgaaccatgaacatagcccatgtccactcacctgggtttctcctctgcgggcactctttctttgcattcgtttatcacaaaccttctgctttctctggttggactctggaaaatgtggcattatcaagtaaaatgatttctggaatttaactattcaactagaaaagacctcagagatttgggggaaaaaaatcccttactcatttctcaaaagagaagctgaagctctgcaggagataaatgacctgcccaagatcacacagtcagagcagatgcaggctaacaccctctctctttgctgtcatcttctttaggaagagcaagccaaaagagagatcagaactgtatgacatctatgtagacttgcctgatcctctagatttattttattggcaaagagagaggttagagggaagcttgaatcacttttcatttcagcgtattctcttcagttaagctgtcctttgagtcatgggttgtttttcttttgggcctttaattgccattacacggcacataaaaataacccaagttcttaacatgcgtatttgcagcaagaacacttgattatatctcttcatcagtcctacctgcagaggccacaggcctgcgctctgcaaggactttttctcgctggggcttttcttctttgtgtggggagttagtgtttcccttggtgatgggccaggtgtaaacaccctgcttatgtaacaaggcccctttcctctgcagacatgatgagctctgaggctctatggcaagacagtgaccgcactaaccatcctttggctggggtgacagtcaggcagtctctctatcaagatgctcccagctcccaggtgatcctgtcccaggaccccaattcaagagctggctttccctgtttattgcatttggaatctttctccttatgggtttggatgtgtccagcttttatcttggaaatttttccgctctgcagtcaatcctctctccaactcagttagtatgtgctttctgcatcaccattattcccttgctcggcgtttacctcatttttacctttcttgctcactttcacttccttttaattctctcactgttaaattcttttttaagcttcccataaccaaaattaccatttattaatatttctcccagggtcccttctgctggcccctgactgaatcctccttgcttcctattaacaatgcctccgcgcatttcaacgtcatctgatagcacaaaattacaagctctttgacactcaagtatttttttttttaaataagactacttaatgaattttgcctattgctagacatagaatctgcctgaaaaataccaggaaaataagatgaggatgtcacttagcaacaaatgccccctaaattatgaacttcaaagaaatattgcttactttgacaatggttaagcgatgcatctggaatcaaagacttaagaaattccccacctctgacatcaataagaaaaggctcaggcttcacacctgttgttccctctacatggaaggctctttcttccactcatggcctcactatttcctgctcagacttcaagtggtgaatgaatatcacttcttcagggaactatgccctgaccctccagtctaaattatattctttgatttgatcctcacatctgtagcccaaacttctcatctgaatttcctgctctgatatccagctgtctgtttgatgtctccatcaggtgtcatagacatcttaaacttagcaagtacaaactgaatccttcatttttctccctcgcacctgtttataccctggtgttccctatttcagtaaatgttctaggtaaatgttaactatttacctagttactcaaaccagaaaccttggagtctgtcttaggttgggtttcttagacacagaggctcagaaggggacttctgtccaattgatgcattgcaagggagccctcaggaaacaccaggctatgcaggaagccagacaaggcagaagcaagaacgtggcaaaagacatgggtgcagctggaatctagcatcaacctgatgccatggacatctgtggagcatgagcaacacaagagttggcttactttgagacaagaaaatggggctttgttactctggtctcagtgagtcattggttacaagcttcccactcccaccacttttctaggtgagtatgctccattgcctgaggtcagagaaggaggacgctgggagccattagcaagcaacactcatacccactggggatagaggcaccagcatggtgaaggggcctgcatggagtcctgacagacctgactgtaccatcctgaactccattctctctctcactgaaccaccctccatcccaccaacatcaccttagtccaaaccagcttctccaccttgactactgtgcattctcttgtcaatagttgtactcctcctccctcccacaagaagtaagaaataaaaggattaaggttgctttctgagatataagctataagaccaatcagaaaagaaaagtggaaagtcgcacttgtaggagcagaatggcttccctctgcaaactcagactgatcaggttaagtggacaagcacacccaaagaaagaccattccaaaggagcagttgttcctacaactggaagctacgcaaaggggaataagggagggatgcactgagagagaccccagaagtgtcagtcaatgaatatcaataattcacatccgattgacaagatagaaattcaaacctcattttgacctgctgctattcaagtcatcaactcaaatctctcactcctttgttctgattctgtgctcaccaagtatctggaaagcatagagaatttgagtagttctacgtcagtgaagttttttttctcactgcaaataataaatgggcattccagcctcatacatcagtatcttgattcaaaaaagccagccagtggtgagtttcacagcctgcatgtctaagagccaagaccctggaccatgacacatttaccaagttgtatgaaagattgcattttcaaaaaaaaagaaaagaaaagaaaagaaaagataaaatggccacagcaagatctctggttccacatggtcttccagaacttttccattcctccatcaagaaatgagagtccatttcctctcctcttgaatctgtgtgggctttcaagactgctttcatgaatagagtacagcacaagtgattctgtctaaataaaggctagaaagcaatatggcttccacttggccctcgctcttttgggatgtttaccttttgaatttgtcgccatgttacaagaaagtacaggacaaggatatgagtaggtgtcctggaagagagccccaactaaaatcctagccaccagctaccatcaactgccaatcatgtgagtgaaagagtcttcatatgattatagccccaagcttatagctacccaatggatggggagtgtagaacagatgaactgtcctcacctagccatagccaaattgcagattcatgagaaaaataaatgctgttgttgatttaagccactaagttttggggtggttttcatgtgacaatagataaacagacagaaagcagcctgtctaatattagcagatgggcctaacattgccatgcaactacacgaatctttttattcattctttatgttcctagttactatggttcttggtttccactctctgacatgggatattcatacctgctcaagactagtcttacatgctggttgactctactcattcctgtggctcctgtgcccaaatatgaaacctggcaccatctatagccttgcctgggttcttctctcatgctccattttattaatttatgcatattcctgagtacaacttttctatttatcctcattcccttgatgatttcactcagtcacatagatttaataccatttttatgctgtagactgtaacatttttatccccagcctgaatcttaccctgaacccaaaaccatactgcttactggatctctacacctagatgaataacggacagctcaaacttagtttccaaaactgacctcttgatctcctaccaccccaaaaatgtttccctcaatctttctcatctcagtaaacggcaagtccatatttccagattgaaaatcctagactcatactctctacctccaagctaccagaaagtcttccatagcattatctttaaaatatgttcggaatctaaccacttcatatcaccttcttggtcaccatcctgacccaagctactatcatcccccacctagattattgacattgcctctcaggtggcctccttgccttcatctttgccccccacgctgtgatctatttccatcgcagtggtctgatcacacttcttcaaccaaatcctaccttactaaggattaaagctaaagactttttaatggcaaataagttattacatgatctagctccctattttccctcagaccttatctcttaccactttctttctagatgactatgctgaaaccacactgaccttcttgctgctcttcaaatatgttctgctgctttccacctgagaacttttgcatttgctctttcctctactggaaatgctttctccccatgtatccacatggatcaaaccaggaatgctgtctccccatttgtccacatggatcaaaccttctcctcaaggctttgctcaatatcacctttagggctttgctcaatatcaccttcttaatgaggcctttcctaaccatccttcctgaaattgcacttgcagcccagcctatccatgccccacccctactttacttttctcaagggtcccaaccaccatctgacagtctgtatgttgtatttgtttgtttattacctgactccacgtgctactatataagttccacaagacagggagttttatgtattttgtccactattgtgtccccatggcctagaacagtgtctggtatatagcatactctcagtaaatgtttgttgaatgaattaactgttgcccaatactgatgacttccagatttccagctacagccaaaaacactcttacattttagacctacatatccagccacctaataaacatctcaaatttgaagttccaaaggcactttaaacgttacaagatcaaaactgaacttgtcttctctgttttagatctgcttctatcactgtattcactctgtgagtgaatgatgtcaccctctgccaagtttctcaaaccagaaaccttggagtccatgccaacaaccacactgtctctactcccctcatccaattgggtgctaagaacctgtcttttgaatcatcttctctcactgctctgctttaatcatttctcacctaaataattacagaggcttcctccaaagcacactcttggtccacaggattgccccttctgctacccttccaagtatctccacagtgatataacttaaaggcaatataatcaaaccatctctctcttcagaagtcatgactggctcctccatcttctagatatttaagcctgcaattattagcatggggttaaggggatcatctttctattctagcctgatcttctgtccccttcccttttcagtactcccacctggctgcactcttttaggtttcccaagcacaaccctccttcccaggctgcctttatttctgcattctccccatctgtctaaaaaagcccagatcatatgtcacatctttaagaacgttaactctcccaccatggaatatcaatggctctttatctgtaccttcctttaggtactcactgtcatggctgttcctgtgttcctcgggtcagggagacagatcctccactttctctcagagtgccctgaccccagccaatgctgtgaccttgaataaatgggagctcagtgagaacctatgaaatgaatgaatgacctccacagtcccaggcattgaattccatgcagctacttttagtcaccaaatctatcttaccagtcccactttttatctcattctgttccctctctccattcatttaaagagtactagcattacactatgcagtttgcatccaaagaatcacaggaggttcagacaatataagaaaccaattgcatctgaatcctcagaacaaaatattcatccatttagagtcaagttggaaggtcaagtctctctctcacacacatatacatatgtgtatacaaattatataataatataggtgtgtgtgtgtgtgtgtgtgtgtgtgtgtatgtattacatgagccaattgagtttatgtaattatgaatgcaggcaaatcccaggatctgcagtatgagttcgaaagctggagaccctggagagtcaaaggtttagttccagtctgaaggccaggaagctcaagactcaggaggagctgcggtttcagttcaagtccagaagcaggaaaatttctcttacttgggagaagatttgccttttgttctactcaggctttcaattgatttgatgagacccacccacatgagggaggacaatctcctttcctcaatctgctggtttaaatgtgagtagtaatacccaaaaacatcttcacagaaatgcctgtaacgatgtttaccaaatatctgggcaccatggctcagccaagtggacacacaaactgtcacagagggcaagtgtactacactccttggatccctttttactagttttgtgagcccttcccttggcttcctagtgtttgggttccaatggcttgcatctgtgcctctcttcaaggcactccctgagactactggcaccacactgcacacatggagcagaaaggcagcaagcacagagagcagggggttccatggaaattatcttcctcacggtagccctggctgatgactgactaactgatggtgcaggaatatggaagcccagcacccttatttccagttgggactttattcactcacttactgtgtccttctgggattttttttaatatatataaaacattgcacatgaattcttatttcaggttctgtttcttatggaaactggcctaagtaagcaacctttctcatagtaccttgttggctttgataagtgttgtttttttcttcctgaagtcaatccctactcagagttcaaggagaccatctaaaatttcctaaagcttttgcatcatcaagtggtctattaaaagcctcctttctgtttggaatcactaagaagcaaacttctgagttaggaaagtgtgagctctggaatcacacctagttctggtctcctgtgggcacacaaaaaaaagagtcaaccttgctgcaatgtcctgaggggaagatattgcctttccttcaaaccttccagaatgagaatttggagcagcctgccatttgctgaactgcatgctttactgtaaaatgagagcacaggaagaaaccagctctaataataataagatccatttagcatttaatctacacacatgctgatttatattataattgcaagttgctagagaggtatgtctcccttcccagagcccccagtgactgcaaaaggtaattaccaaaatggcacaagtctgcttatcatgtggaagcctcatgttttttgaaataacttaaccctgggtgtcactgagctttccctgaagagaattgggagcaggaaatccacttcaatgagtgagatattcctttttcttcttgtaatatatgaacttattttaatcacttttctgcttttttcagtacaagtaggtaaccaggagagtgggaaatatagtcctttaaaaaacctgatgataaacactgtcaaagaaagtcctttagaaaatggctgcaggatgttcttgtttgttttgttttgtttttgatacggagtctcactgtgttgcccaggctagagtgcagtggtgcaatctcggcctcctgagtagctgggattacaggcacccactaccacgcccggctaatctttgtatttttagtagagatggggtttcaccatgttgctcaggctggtcttgaactcttggcctctggtgatccacccgcctaggcctcccaaagtgctgggattacaggtgtgagccaccacgcccggccagtatgttcttgaaaccaaggcatttcagggtattttctgctactcgagaattctggccatcaggctatggaacgttgagcatggttgcacacactcacatgcactcacgcgtacacacactttcatagagttattacttttttaaagtctaatgcctagagtggtctggaatgaatgctgacatactgtgagaaataaagaatgagaccggacccacgagtaaccaaatgagcatttcaccagtcagagtgagtgaccaaaggacagctaagaccgttgcattccaccttcccctctggccaagtttgcttcccaatctaagtttggcttctcggtcttccctgaccttcactatcaaaccaagtcttcacaggagatgaaacacctttctgtgaaacacagtagatgttcaccaggtagatgcagggagagggattgccagccaaagcagcagcaatgaagtcacggggctgggaatggagccacatgttggggagttataattagttcattactctaaaaaatagagttactcaactcaaaaaaaaaataaggatggacagatagaccaagttcacctcaagaggaattcatatgttaggtaggagtttgaaattaaatagctatcaaaggtttcaatcaaggaggtgatacgattccatgatgttgatagaagctcatttgggcagcagtgtggacaatgaccagatggatcagtaatggaggcaaaaacactagacagagctgttgtgatgtaagtgtccaggtcagagggtaagagccaaaatataggatgagaagagagggtggatcacagtcccattggttggtagaactggcaggaagaaagggtttctagtggatatgtcattgtgcgtacacatggtgctgtggcagtcgtctacaaagccggtctcctgggacctgtcctcatctctgaaatgagggccagttttgttatgggtgctcactaattacttgctaactcatttgatctgacattcatccctcatctcaaccattcttcaggagatgcccttacagtcagtaaaatgatgaaacagcgaataatgtaacttcagtgagtctcctaatttttttgaatctccgtttctacatttataaaaggaggctaagcaagaatccttactgatcgcttccagctcaagtactccaagtcagccagttctcaggagagtgagctggcagctgcctcctgggggaatattgttggaattcttgagagatgatcaggctgggggagcatctccccacagctcccctccaaacccagggttaaccaagagacagctacacttaagaactgtatttgtattattcacaggcactgaaacagtcattgttttggcaattccctttagtggaggaaataaaatgagccatattgtggggaaggtggggctgtgtttccaaggtaagcttgctggtagtataaaattgtgtttttatttaaagtgaatttccagttggctgaatttatgctgcctttgatgcctactcagtgctttgaatacaacctgcttgtcctcgctttgttttccccacgccctgagaggggatccctagattgctgattaaaagctattcagcaacagcctgcaagtgctacaccgataacattatctttactgattcatcagggctgccctggtgcaggtgggagactgtggctgagtctctccagacaagtgttgtcagctctggcttgagccttcagaatcttgtggacaaagaaccttaagggaggacagaaagtttccgagggcggtcttgtcccagacttcacccttgcttgaatcaccttcccattttgtacttggctcaccagagcactgctttcccttgtcaattccgtgaagtgagtaggaggctctatggtgaacactgtgtgctcctgctttgaaagagaaagaagtgagaggttctgtacagttctgcagggatttcaaagctaacacttgatgactgtgttaagggaaggcagggctcacatgcaagtgagccctcagggctagaatttcccttgatcgaagtgctggcctgaaaagaccactggactcagaagctttgcttccaacttcatagctccttcatctataaaatcatggagaaacattacttaatctccactacctcttacaggtctgagtcttttagaagcatacccctagtaattaatagtcctcgttcttgattggtgaagtgagcacagaagccaagggagaaatacatgagtgcccttgggtccttctacctccatgctttaatcatgctcatggataggaagaatcaatatcgtgaaaatggccatactgccaaagtaatttatagattcagtgctatccccatcaagctgctattgactttcttcacagaattagaaaaaactactttaaatgttatatggaacaaaaaaagagcctgtatagccaagacaatcctaagcaaaaagaacaaagctgtgagcatcatgccaccagacttccaactatactacaaggctacagtaaccaaaagagcatggtactggtaccaaaacagatatatagaccaatggaacagaacagaggcctcagaatgtcacacatctgcaaccatctgatctttgatcaacttgacaaaaacaagcaatggggaaaggattccctatttaataaatgatgttgggaaaactggctagccatatgcagaaaactgaaactggatcccttctttacaccttatacaaaaatcaactcaatatgcattaaagacttaaacatgagacctaataccataaaaaccctagaagaaaacctaggcaataccattcaggacataggcatgggcaaagatttcatgactaaaacatgaaaagcaatggcgacaaaagccaaaagtgacaaatgggatctaattaaactgaagagcttctgcacagcaaaagaaaatgtcatcagaatgaacagacaacctacagaatgggagaaaatttttgcaggtggatatctgacaaagggctaatatccagaatctataagaacttaaacaaatttataagaaaaaaacaaacaaccccatcaaaaagtgggcaaaggatatgaacagacacttcgcagaagaagacatttatgcaatcaacaaacatgaagaaaagctcatcatcattggtcattagagaaaatcaaaatcaaaatcaaatgagataccatctcatttgaaatcaaaaccacaatgagataccatctcacaccagttagaatggtaatcattaaaaagtcaggaaacaacagatgctggagaggatatggagaaatagaaacacctttacattgttggtgggagtgtaaattagttcaaccattgtgcaagacagtgtggcaattcctcaaggatctagaaccagaaataccatttgacccagcaatgtcattactgggtatatacccaaaagattataaatcattctactataaagacacatgcacacgtatgtttattgtgacactattcacaatagcaaagacttggaaccaacccaaatgcccatcagtgatagactggataaaggaaatgtggcacatatacaccatggaataccatgcagccatgaaaaaggatgagttcatgtcctttgcagggacatggatgaagctggaaatcatcattctcagctaactaacacaggaacagaaaaccaaacactgcacgttctcactcataagtgggagtggaacaatatgaacacatggacacagggagggaaacatcacacactgggacctgtcgggggtagggggctaggggagggatagcattaggagaaatacctaatgtagatgacaggttgataggtggagcaaaccaccattgcacatgtatacctatgtaaaaaacctgcatgttccgcacatgtatcccagaacttaaagtataatttttttgaaaaaagagctctctaaggtgctgaggagctggaggaaccaaaataatttatcttgcaaacagggaaacttcagaaaatgaaaagttgtgctcttaatatttccgccaggacaacaggcctgaactagaacaacgcaatgaacagtgtctttgagtacaaaactgcttattactaatatatgaacattctcactgaggcttcttcacagtttgtacctgaagaacagaaatgatgattacatggagaaccttgttctgacccctaagatgaagtgggtgggttttgatttcttgttaccaaggtaacctctttcaatgagccttgaaaagataattactcagtgtgaagacttttgctttgcatggcacaccaatacagttcacagacaatcatttacataagaaacaaccggcacacacagattcaccttgattttatgaagtgcaactattcggagcataaacatatatctataaaagaacttaatcagcattaatttataagtatctcatcttaacatttaagataagtttttagagctctaaggattcaaaacaacaagcttgcccaatttccccattttataaatgataccggggcctaaaaattaaattataagcccaataatctcagagcatattaacagcagaaatgggactaaaaattaggtttcctgactcctggtccagtgttcttctcatcactttgtgtattttttatagctctccaccaatgaggcagactatatttttaaaatattatttttagttatttcaggtagaaattagtaattgacaacacttcaaaaataaagagaagctcaaattacaataaaatatcatgtagtctttccatccataaatagccatgttaattttccatatacatccaggcacctttctacagatggatcctatatttttaaaaaaggaagagagatcacattgtactgtattttaacctacttttttcctttaatattttattgtaaatatgagttccatgtcattaaacttgcatttgtggcagcatcttgctgacatagtttatttcccatcgcagtaaattttacacatgcagactcagtgaaattgaatctcaaattgggcctaccctgaattttttatgcccaaaagtcagcctcaatttgctccagacacaactctagtaaatcttggaatccaaaaagagaaaaactgtcttagtcacggcctaaggaaaaacagtgaaacccacagctcttagacagcgggaaaattgctcagtgctgtttataagagaaatgcatattaaaattgcaattaccgtttttctattattaaattggaaaaggtcaacaagcctgacaacacattgtatgagagagcacgcagcgtggggggaaatcagcactcttatgtattgctgtgggaaaaaaaatcaatacagcctctatggagagaaactgagcaaaatctattaacattacaagtacaaacatccttcaattcagcaatatctttctaattctaggaaatattactcatatttatcttccaaagtgcaaaatgatatgtgcttgaagttaatgattgcatcacagtttctaatcaagaaagactgaaattatcttaaatacctataaataggggattggtgggcttatccatagaatgcaaaaccatgtagccacaaagaatgtggccttttgcatactcatataaggcaaattccaagaattaatgttaagtgggaaaagtagaaaagcaggaaaatgcacagtgtgttgccatttatgtaagataagaaacgcattaaatatctcaagaatacacaagagtctcctttgtcatccagaatcttgggcaccatggaaactgatatccttgaacacgcagaaacttgggttcaagttttggcaaatctctactgattagcagcaaacaagttgtgtttctcatgtcacttttgttgtttattgtttatacaatagtctgccttttctcttctctctcctttttccctcctatgggtggctgctttcctcatcaaggagattggtcaaattcaatagtgtttaataaaagctagaaagtggtaatttctgtgtgagcataagactgtgattctccagttcaacacttgcatttgtccttttataaacaaaccttttgacctgagccctaaattagcccaccgggctccaaacaaataacgaggttgaaaacaaaggggaggttactgtcataatcttctcaattgctgctcattactggacatcagggacttggacaaatatgttctgcagatagagattgagtaactgagactggaaccctggacttagaaccttgctacatcctggggataatgagccaagtgccttccctaatgcctttcatagccacacatagatgttttccaagcatgttctgaactttaaagtgtaaagcgttaggtctcctgttataagaaagaatccaactggctgcagccagtgactgtcagctccgttctgcaaaaggatggtccatgagtcagggcatcaggcctgttgctatccttctctagttatcatggctttgtctgctttctttacatcatcattcttgtagcacataatttgatgtcttccacactttcatatcttgtgctagaagtataagaaaaacagattatacctttagatagctccgccagcttttcagagctttagtgatcttgaagtctattctgtttgattttttaaaaaaatgtttgtacttctatgtgtccatgaattgctgagggcaagaaactcaaaacccaagttctcccagataaaggttcgcattattctttgtgccacctgatgtcctggcagatactgtcaggatccctttcataacctcacagcactcacctttacaaaatgaaagcaaataccagtgattctctgcctgagaagtttctcttgcctgtgtataaggaaaaccaaagcgtcagttatctccagaagcggtctctaaccaatgatgaacaggaagttgggtcctaacgatctcagtttcctcattcttcatttgtgattacttaggcatgttctacaccatctcccagagttctccactgaattacactccagttgtccaaagtgggaacctgctggatcatacacatttttacaaatgcagcagagatgaatgagatagtgagagtttcctttccagtaatgagataataaaatatcagaagaaatcctagttaataatacacatctcaaccaatactggattttttaagcaatttttttgtaaaatctatggacaaactagccagtgaaaaaataagacaattccttaaaaagtggaaataaagaaaaagccaaattcaaagaagtaaacagtgctggaactagcattctctctatgtgtctctgatctcaggcactctcaaccttgaattttagtgagacatgatggggaacagaaaacaaaactcggacccaaactgggtgggagtcctgaaaaaatattcaacataaagctgcgaccttcaagagataatgctctcaggtgtagacaaagaaaaaacccttccaagaggagagaggatgttgatccattcatgtctcatgtcttggccttggtgatgggagaaacattaataataataactttttaaataaacttccttagaaatctctgaccataactaccaccaccaggttgagggcagaatttccttaacctatgagttctgaaataatccaagccctgactgtaaattaaagtgttcctgggttagtagtatgtgtaagaaaccagcagaaacaattgcacatcctttttagaggactatcatcttgactcaaaactccaaagcattcctagagacaaagctccaagaaaaatgagctcacaatcaaatatcaccacacacggaaaacaaggtaacgtgagtgacaggaaagacaacaagataatcatactggcaatgactacagatattggaattaacagaacacaaaataattacggatgggcagatataaaagcattggaaatatgatgaaggaataaaaaacacccaacattgaccaggtatttttgaaaaagaaacaaatagaacttctgaagaaaactgtcagaattaacatcagaagttccatggatgggggaagcagcaggttagagacatctgagatgagagcccatgcatgaatgggaaagtggatctgaaaaaaagtacaaggagatatatggaaaaatgcagtgcagagagacgacaggaaggagcataggatgaagaagtccaacatgtgtaatcaaggtttcagaaagaaaatcaagaggcagtgggccagaagcaataactgaagagataatgcctgagaaatttccagaactgcctgctgaaaggattacattattcctcagatgcagaaaccgtattgaacccaatgagcagaaataaaaagaaactcataagtagacatatccctgtaaaattatataataacatatttttatttttaaaaaatcttagaaatagccagagaaaaagacaaatatatgaaactagaaagaaagctgctgtgtcaatgacagccaaaggcacaggactgtggaatacaatttcaaagtgctaagagaaaaataactgtgagcatagaattgtacagctagcaaagataaacttgcagggggcagtggaaataaggttaaagacattttcagacaaccaaactggagactattttgctaaaagatttttactacagaaacctcaaaaagaaagaaaatgatgcctggaaaatctaagacacaagaaggaatggtaaacaaagaaaatgataagcatgtcatagtaaatgtttggggttaaaaaataaagttgaattgaaatccttgacagcaatagtacagaaactaggagctggtgaatggaagtaaaacattctacaataaaatcttattttgtttgtgagaagcctaaagattatgctgaatcttagatcttgttaaacttacattcaataggtgtagcattttcgagggggcatgcagaagccttctgagaatgggggtactctgtttcttgatctacatgctggctataggagggtgttcatttgtgaaaagtcagtaagctgcacacttgtaagatatgcattttttctatatgtaaattatactgtagtaaaaattcaaaacataaaagagaaatcactagggtgaccatttaagtaatagacttaagtaacaggacttactgttatatacagggtatataaataggatatacaacttcaaaaccaggagaggaaataagtgaattagagaaacacacaccagatccaaaagaaaattaaaaagttaaaaggtcaagtaaaataaaaaaagaaaaaatgaaaagggccaaattttaaaaatacataaaagtgtatccaaatatatctgcagtcataatcaatatagatttgttaaatgacacaaatttacggtctggatcttttcaaatgtgaagaaaatggtataataaatacttaaaacaaatgatgagataccataagaataccaactaaagaagagttagtgcaggtattaatagtaagcaaaatagactttctagacaaagcattagaagtgttaaagtgaggcactaaaaactgataaagatttcagtgcacaaaagcattacaggaattctaaatttcacaataatgatattatagctactaaaataaatatattcaccctaagactggaaaaaatgataaagccaccattctagtaggagctacttaattcttccttctctgtaattgaatgaaagaagattttttaaaaggcacaggataaagatttgaacaatggcagaaatcaaaacttcctctttaaaaaataccatccttcctccaaaggacatgaactcatccttttttatgactgcatagtattccacggtatatatgtgtcacattttctttatccagtctatcattgatgggcatttgggttggttccaagtctttgctattgtgaatagtgctgcaataaacatgcatgtgcatgtgtctttatagcagaataatttgtagtcctttggtcatctacccagtaatgggagtgtttctggttctatatccttgagaaattgccacactgtcttccacaatggctgaactaatacactcccaccagcagtgtaaaaacgttcctatttctccacatcctctccagcatctgttgtttcctgactttttaatgatcgccattctaactggcatgagatggtatctcatcgtggtattgatttgcatttctctaacgatggatgaagctggaaaccatcattctcagcaaactaacacaggaacagaaaaccaaacactgcatgttctcactcataagtgggagctgagcaatgagaaaacatggacacagggaggggaacatcacacaccatggcctgtcgggcattgggggactaggggagggatagcattaggagaaatacctaatgcagatgacgggttgatgggtgcagcaaaccaccatggcacatgtatacctatgtaacaaaccttcacattctgcacatgtatcccaaaacttaaagtacttatatatatatatatatggagaaacaaaatcattttaaaatgtgactgcaacccctgaaataacaaaaacaccttcaaatctctggacaaattcatttagaatgctctttaaacaaaaataaaacctgtattttttctgattccaaaaacaatataaaatgctcatataaaattgcaagatctcaagtatgatatgactctcatcatcacacatctcagataaataaatgcactgttaggtgtttggtcttccttagatctccttaatctcgattgtgaggcaggaagcatttttaatgagtctgtgttctaagagtcatgctctttgtcaaatccactacagatgaccatagttttaccaattaattaggcctctccactctgctttgatacctgaaaaataactggtttgaaatcatggaggaaaaacccaggccaaggtattaattgatgtttcaggctgcaataaagagatgactttttctgaccaatgagagggtagattaattagcaggataaaacttcaatactgttttaattgattggaactttccagtgtccctccctgagcaataatgtggatatacattaagcttttgggtacacaagagtaagaaaaagagaaaaatgagataagatgaacagtgaggtgtatgttctggtgttgcccatttagaggcaacaatgagagtagatgcattggcttccagtcacacgccctgatgttctccctttttccctgataagcagcagctcaataagagatttgcccaagtgtttgttattttgcagcctgacagggaggcactttcaaaaggtttgctttcttcttttgcaggactactaggcatgtagagaaactctctagatgctcagtgtattcatttgttattacttccataacaaataactgctaatggagtggcttatataacacaaatgcattatctttaagtttttaaagtcagatgtgcaacatggatctcactgggctagaatcaaggtgttgtcagggctatgttcttttctggtagctctagaggggcatctgtttccctgctcatttggtttttgacagaattcagttccttttgattgtgaccaagattccttgtgaccttccagctgagagccatctccagcttctaggggcccctgtcttccttgacttgtggcctcctttctccatattcaaagccagcaatgacagattgagttcccctcatgcttcaacacccttctccttcttccagcttatctctctctccccagctgggaaagattctccacttttaaggacttgtgtgattaaagtgggctcacctggataatccaggatattttttccctgtctcaagttctgtaaccttaatcacatgccaagtcccttctgccatacatgtgaagtgacacgttcatgagtaccagggattaaggcatggacatctttgggagacctttttctgctaaccacagtgggatagagaggcggttctatcacagtctggttctcacagtttgggaaccaagtgagcacttcaagctgcagaaaacccttgcatgggggaaggaaagaggatggctctgttctttcctttttcctgctctccctcccctgccttcactgtctagatgccaggatccaagccatgggctgaggaaagtcaagaaggcatagcagtccttcctaactgggctgtgggatatctgagtgcataccagtgtattcaatgcttaaagaacgcttttgtggtttcttcagggttccctacagggtatttctctcctacagctctctagcagaggaggtgcatctctatccagatgacaaatgcacactgagaagaaatgcaggaagtcagcctgaagggctcaagtacatggcaataggtggagttgcaagtgaggactcaaccatatgaaatggggctgtgtaaagagtgggagacagcaatgggggtgctgtggctcagggactgggaagaggctcaactatccaatgcgctctaacataaggtcttaatctcagtggggggcttccccagaagcagacattgagaggaaaattcaaaggcaagcagtttacctggatgtttcctgcaataccagcagggaagttgggatgttatataaggaagggaggcagcctataaggcatgcattgttatatcaactaagtggtggacaactgaagcttcatcccatgggagagccaggagaagcagtgtggaacacactgcagagctagctaacctgaggggcaagggacctggggaactcacacactgtctgctgtcactcactggctgagtttcctcctggggaatgtttaatgctccaacacttctggcttgtgtgggcagagcatccttgttaaaaagtcccctgtcacagagtggcagggcaggcatctaaagttatcagctgtacactggcatagtagcattctagacaaacaaatgatgcatccaggcctggggtgaaatgaaagggaagagtaagagaaaagtatgcatgctgttgttgtgcactttgaggaatagaatatatcccacaatctggatagggataaatctagaatggaaaagagggtttcaaaagatatcaggttcaagagaccaagagtatcatagtgactggggtgcaatgactagtatgcaaaacagtagcaatagaaaccagtatgtaccaaaagctcatttacatggcataagaatgagggcaagactgtggggaatgggcagggaagaggtgagcaagcctttatggagaaagactggctgagaccatgtcttcaaggatggatcagagctagaacactttgcatcatttgttttggtaacctctttctgctgtgacatttaattaaagccagaaggaaagtgagagggaaaatggccatgtccattgcatgaggggaaggggtatctcccaaagttcattctaggcacagccatggggctgtcctggagcacaagatgaatgctctttgctgtatgctgagatcgtctcagaagaaaagatcacacagtggtatttcagagctgaaatggttttctcagctcctttttcctaatttgctggagactagttcagagaaagtaattagagttgctttggtaatgtgtttgctttaccactttcaattaaggacaagaataaagtgagagaaagagagagagagagtgcacaacagtgaaagtacattttaatgctcccaccagtcctccatgcaaacttgcacattattttcttggttattttaaactaatgagtccccaagttgtttcattttaagcagctttgttaaggtataattaacatataataagttgcacatacttaaactgtgcaattttgataagttttgacatatacataaatgatgaaaccactactgcaatcaagataatgaatatgcccacgattctaaaaggttatctgtgttttttgaaaacccatcctctagcccctcctgcccctacaggcactctgaaacagacaaccacttgctttctgtcgctataggttagtttacattggtagaattttatgtaaatgcagccatgcagcatgtactcttttttgtatcatctggaattatcttgagattcatctgtggttttttatgtatcaatagtttattacttttcattgctgagtggtcttaagttttcaagattacaaaatcaaatatttctttaattttgagacgtggtcattgtatcattttcttagggctgccttaattaattaccacaagctttaaagaacagaaatttgtttcaatttctggtggctttaaacaacagaaatttattgtcttgcatttctggaggctagacttcaaaatcagggtgtcagcacattcccttggaaggctcagggaaaattgtgcccttctctgagcttctggtattgctggcagtcctgggtattccttagcatgcaggcacatcactctcatctctgcctgtattgtttatggtgttctcccctgactgtctctgtctctgtgtctcttctcctcttcttaaaatgataccaatcatactggattaagggcccactctattccattatgaccgtatctgaattaattacatttgcaatggtcctatttccaaataagttcacattctgtgatttcagaaaggacttgaatttgtaggggacagcatccaaccccggacagtcatcctacttcacgaaatgttgtatggctctgttgaattaagttaggaaaggagtgaataattttgttttagaattcttgacctatcttgagatcacgtgagctaggaatcacatttcccaaagtgtattccaaataattacacataaaatcatattctctaaaagtaggatagtgtggtcaaataagtttgatgaaggctggtttttttttaagtgtctttattgaaggcttgtcaaatctttaacatgtacgactagaataaacttggctcttttcattgcctttctcagcacagcgttgctttcaagagctacaaatgaattgaaaagcaatttaaatctgtattgcagaactcttaaccagagggaaaatacactacattatgtacagtaaaaatgcccccaagatccctatgcattcccacaaagccaactgatcaccttgcagcagctgcccccaaattatagagtcatctgcttaaaaatcctccccaaacctttcttccaaaatataatctgagctaaccttgtctcttctgtcccttcctccactcccaccttcccaaattcattttttaatagaaaaatggaaagttgtctgccctttctaacttagaaaaattcagcttttaggtactctgtggttttccttcctaatgcaaatacactaaaactgtcttagaatggataaaaggagggatggtagatggttttcaatcatgagaaaatctgctgaactaagtggtgcaggttgaaccaaggaagaagttatgaagggaggacaatggcagacatgccaggaagatggtaccactatttgttccaagctcaaacctcaaagctttctggtaaattcctgaacaaagaaaattgttatctttgatacctctggttggcctactcaaaaagagactgccaggtggacctttctctgcttacttccagatcatcagcttaggcaaaaattgtgcaaacaagattcactgtgtccagactaccaacagttttatttttctcctgtcttatgactcccgtttttgcctttgtttcctggctcattctaccaactgactcctcatgtgagtaaacaatatgagtgcaaaataaactaataagcatgctgcaaaataactacaaacgtctctgaatttttctttgataaaaaactttttctggtctctgtcacataaatgatacttcacaaggaatacccaagtggggtataccacgtactccagcttttctggaagctctgcacttgcctttgagaggcttttcaatgacaaggcttcaaatgtttacgcacatacattcaatttgccagtgttcttaccagccaggtctgcggaccccagtgtttccagttggaagccactaaaaggtaggcaagcagcccattgaataactaccaaacacaggatatactcaaagcaaaatataatttttccctaacatcttccctttaatagaaattctctgcttctgggtgaaatcttacataggtccaatgagttaggctacacagtatcatggtcactttagcacataaagcctcgatttggaagttagactgaccagttcttgatagtaatgagatgtttgggcaaaagttagtgtcccatctcccattctctagctaggcccactgtggcctgtcagtttcaggcagtggaggcaggggtggttccccttcattctttccctacaatattccttcctcccatagcagctgactgcaggaaagagcatgggctgtggaaaagccaccttctgacatacggggtctgttcttcaccttatgtcatgactctggtatcaggtatcaatactttctcttacagatgcacttgtgggctcttccagatgcaggtcccataatgtagaccatgtttcttctttggctagtcacagtgtgtccagttcatggtcagatgctcactgttggggttctcctcaactctttgagggagtccccttgccaagggtctgaaatagctccagaggcactctctttcatccagggtcagtggcaggtccacgggacacactcatactcgctgtgacccatggtggacagggaacacgctcatttcccatatgcaaaagccacccacagacaaccacaaaaaggtgtcagcatcccttccctgacctctgaatttcttgggtttggagacagattaccatctcctgggtctccaaagtttgggggggctgcgtatcaagttctgaatggccccattgagctcttctccccaaacactaagattgagatgaaggaacaggtgatgtttgtacacctcccagcagcacaactttctctaaatactcattaaaaactcctctttcgagaagtgtctgaagacatttatgcagccaaaaaacacatgaaaaaatgctcatcatcactggccatcagagaaatgcaaatcaaaaccacaatgagataccatctcacaccagttagaatggcgatcattaaaaagtcaggaaacaacaggtgctggagaggatgtggagaaataggaacaattttacactgttggtgggactgtaaactagttcaaccattgcagaagtcagtgtggcgattcctcagggatctagaactagaaataccatttgacccagccatctcattactgggtatatacccaaaggactataaatcatgctgctataaagacacatgcacatgtatgtttattgcagcactattcacaatagcaaagacttggaaccaacccaaatgtccaacaatgatagactggattaagaaaatgtggcacatatacaccatggaatactatgcagccataaaaaatgatgagttcatgtcctttgtagggacatggatgaaactggaaaccatcattctcagcaaaccatcacaaggacaaaaaaccaaacaccgcatattctcactcataggtgggaattgaacaatgagaacacatggacacaggaaggggaacatcacacaccggggactgttgtggggtagggggagtggggagggacagcactaggagatatacctaatgctaaatgacgagttaatgggtgcagcacaccaacatggcacatgtatacatatgtaacaaacctgcacgttgtgcacatgtaccctaaaacttaaagtataataaaaaaaaaactcctctttctacatctcactgtcttgaacctccagatgaggtgctcaaaagttttgaagctgatttttctttgtaaatgctgcatgtgatgagctggtgcctcactttggaatttcatttctatcatatcttggttcccattagaaattttaagatcctgttagaataagacatgtgttaaagggcaaaaatgatggctagcacaccctttctctaataaagaatgccagaaatcggacaggcctaccactgtatgatttttctctttgatgctgtattgacctgattttctacgtatacatcatgtaggaaaaaaaaagaagacccatgcaaatgtaaaaaaaaaaatcatgactcagagcaaaaataaaagtagcaaagttaaattttaagtgcctctttgaagttttaaacagtgcattccaaattccaaaatagtttttgagataaaacatttttaaataattaattttaaaaactactttaagaaacaatccagatgttcaaaataagtggcttattaaacacataagtgtagtttatattttggataacttgacagtaattacaaataatcatctagatctaaacttgttttctcttttagtcatataaaataactctacatatttatgcattacatgtgtttgttacatgcatagaatgtatattgatcaagtcatcaccttgagtatttctcgtttttatgcgttagtatcatttcaagtcctctcttctaactactttgaaatatacataatcttgttgcaaagtatagtcactctagtcggtattaaacattagaactgattccttctatctaactgcatgtttctactcataaccaacctctctttaactcccctcccactcagcccatcttctcagtctctcgtatctatcactctattctctatgttcacgagatacattttaagtgctccctgaaatagctccaggaacactctcttttttccagggtccatggctggtccacgggagacactcatacacgctgtgacccatggcagacaggaaacacactcacttcccatatgcaaaagccactcacggacaaccaccaaaggttctcaagagcccttcaagatctctgcatgagtgaaaacatgcagtatttgtctttctgttgctagcttatttcacttaatataatggcctccagttctatccacgttgttgcaaatgacattatttcattctttttaatggccaaatagcattccattatgtatatatactacttttttaatctattcatccattgatggacacttatgttgactccataactttgctattgtgaatcagcctatgataaacatgtgaatgcaagtgtccctttgacagggtgatatttttttcctttggaaaaatacccagtagtgagattgatggattgtatgatagttttagttttaaagaaatctccacactgttttccatattggttatattaatttatattccctccaacagtgtataagtgctcccttttctccgcatcctcaccagaatctgttatttttttctttttataatagccactctaactgggctgaaataatatctccttggggttttgatttgcatttccctgatggttagtgatgttgagcattttttcataaacctgttggccatgtgtatgtggtcttttgagaaatgtctattctcaaaatatgtcctgtgcccatattttagtgactttttttgttttcactgtttagttgtttgagttccttgtattttttggatatcagtcgcctgtctgatgagtaatttgaaaatattttctcccatttaataggttgtctcttcactctgttaattgtttcttctgctgtacagaaggtttctggtttaatatagttccatttatctacttttatttttgttttctgtgcttttgcagtcttatccataaaatctttgcctagagtgatttttgaagtttttcctatgctttcttctaatagttttatagttttgggtcttacatgtaagtctttagtccatcttgagttgatttttgtgcatgatgagacatagggacccagtttcattcttttgcatatggttatccagtttgcccagcgccacttatttaagagggtatccattccccagtttatattcttggcagctttggcaaatctcagttggctgtaaatacacggatttatttatatgttctctatcctattccattggtttacatatctatttttataaatatggttttcgttactacagcctggtgatatgttttgaaatcagacagtgtaatccttccagctttgttctttttgctccaggtagctttggttatttgggctttttttggttccatacaaattttaggatttttttttctacttctgtgaaaaatgatactgatattttgataggaattacactgaatatgtagattgctttgagcagtgtggtcattttgactagattaattcttccaatccatgagcataagatgtttttccatgtgtttgtgttgtagattttttaatagcgatcttttacctccttggttaaatttatacctaggtattttgtttttcttgtaggtgttataagtggaattgccttgttgatttcttttttggttgtttcatcctcattggtgtatagaaaagctactgacttttgtaaattgattttgtatcctgcaacttcactgaatttttttttatcagctctggaaggtttttggtgaagtcttttggtttttctaggtataagatcataccatttgccaaaagggacagtttgatttcttttccgatttggataccactttttttttcttgcctgatttctctggctaggacttccagtacaatgttgaacagaagtggtgaaagtgggcatccttatcttgttctagttcttaaagcaaaggcgttcaacttttcccaactcagtatgatgttagctatgagtttgtcatatatggtctttattattttgaagtatggtcattctattcctagtttgttgagtgttgttatcataaagggtgatgaattttgtcaaatgcttttcctgtgtctactaagatgatcatatggtttttgtccattttgttggtgtgatgtatcatgtttattgatttgtatatgctgaaccactcttgcatccttgagataaatcccacttgatcatggcgtattatctcttcgatgtgctattggattcagtttgctagaattttgctgaggatttttggatctatgttcatcaggaatattgacctgtagtttctgttgttttcgttgtgcccttatctggttttggtatcagggtaatactggccttatagaatgagttagagagaattatctccaattattatgaaattttgattgttttatacagttaaaaataaaaataaaccaaacatttttatggcatgccttttagtaagtgtatttgtatactcacaaaaaagtctgaaacaattaacacctatatattgagaaaagtcatttctgagtggtagaattgtaggaaattttcagtgtttacttaatttagttttagtttacatttttctgcattacctgatttctttaaaatgaatatttttatctcttatagtaagaagaaaaattaaaaagatgttttaattgaaataaagtatatttctttcaaaaatgtgcagtctttcaactaacatggttgtgcttgagttgttacaaaatgcagcaagaatttttcatattaaccataattttgtttcaattctgaattgggtggctttgcatgtaaatatgtctttaaaaatttcttaaaatattgatgagccaagccacttgtaaataagtctgtttatagtctcatgatttaatacatatttctttgattcagtggttgtaaaccaattgtatgcaaaaaaaaactatgaaatttcaatttgcaaacattttcccaatcacacaatagaaaaatagccttaagaattgggcagcttaagttccaattaaatagattgcttatccatattagatatatgcattgtgtctgttttcaataatatatacagatttctattctgcaagcttatttaaatatatatattctatattcattataatattactatatgcttcacttatatcaattcttcctaggccccataggaggaaatttatctgctaatgttacagattgaagagagaggagagagacacagcagggcataatacgtgcaatacattcttaatcagtcttccttgggaatcatagagcttatggatatagagtaaatgtgcagcaagaatgatctggtataccattatcttttaattggagtttctatttctgtcactgtttcatttgctcaccataatagcttaaaccgtagcaattggcagaagcaacattgttggtttggactgtagacaacaggacacatgcaagtcttttatttccaaagaggcttggagaggaattttggattttgcatagattttgcttggggaacaaactgaatctgaaaatagctaactgcatttaaatcagattcctgagaagtctttgcatccaagcaacacctgatgagtccttcccaactccttttcttatttcttcaatttctagctgaaggttaattttttacaagtttaaagatgtatcttcctgcaaatgttatataagaagactgaaaaatggaaggctttgtgtttgttgggagctaatgacccaacacatcaatccattcatacataaaatgtgagcagacaactttgtctttgcataatagatggtgaaatttctgatagtacttgtctttgtttggaggcaattcacaaatggaaatgggaaatgctgagcctggctagcctagacaattacatttctattttctaagttgcctgtctctttttgctcctaaaagttaagtcttatccttataaacagcaacagtgtttgttcccaaacttgtttataccactttccaatttctgaaattatgcactctttaaatgtcatgtgaagacaataaaatatgagtgcaaagagatttcttttttataaaacttagttgaatactttggacaatctcgataaaggtgaataacttaaaatttgctatgaattaatttacactccccccaacagtgtaaaagtgttcctatttccccacatcctctccagcatctgttgtttcctgactttttaatgattgccatgctaactggcataagatggtatctcactgtggttttgatttgcatttctctaatgaccagtgaggatgagcttattttcatatgtttgttggctgcataaatgtcttcttttgagaagtgtctgttcatatcctttgcccaattttttatggggctgttttttcgtgtaaacttatttaagttccttgtagattctggatattagccatttgtcagacggacagattgcaaaaaatttgctcccattctgtagcttgcctgttcactctgatgatagtttcttttgctgtgctgaagctctttagtttaattagatcccatttgccacgttgggcttttgttgcattgcttttggtattttagtcatgaagtccttgcccatgcctatgtcctgcatggtattgcattaggttttcttctagggtttttgtggttttaggtcttacgtttaagtgtttaatccatcttgagctaatttttgtataaggtgtaaggaaggggtccagtttcagttttctgcaaccattgtagaagacagtgtggcaattcctcgaggatctagaaccagaaataccatttgacccagcaatgccattactgggtatatacccaaaggattataaatcattctactataaagacacatgcacacgtatgtttattgtgacactattcacaatagcaaagacttggaaccaacccaaatgcccatcagtgatagactggataaaggaaatgtggcacatatacaccatggaataccatgcagccatgaaaaaggatgagttcatgtcctttgcagggacatggatgaagctggaaatcatcattctcagcaaactaacacaggaacagaaaaccaaacactgcacattctcactcataagtaggagttgaacaataagaacacatggacatagggagggaaacatcacacaccgggacctgtcagtgggtagggggctaggggagggatagcattagaagaaatacctaatgtagatgacaggttgatgggtgcagcaaaccaccatggcacgtgtatatctatgtaactaacctgcatgttctccatatatatcctagaacttaaagtataatttaaaaaataaatttatgcctgtagtcccagcactttgggaggccgaggcgggcggatcacgaggtcaggagatcgagactatcctggctaacacagtgaaaccccgtctctactaaaaatacaaaaaattagccgggcatggtggcgggcgcctgtggtctcagctactcgggaggctgaggcaggagaatggcgtgaacccgggaggcgcagcttgcagtgagccgagatcgcgccactgcactccagcctgggtgacagagcaagactccttctcaaaaaaaaaaaaaaaaaattggcgaaaaaaatgctatgaattaaaaatgatatgactgtaaaagattagggagaaaagtgttaaaagtaggaagattctgtactcaaattatttcccctttttttttctactgtcatcattgtaatttaattattgtttctctttaaagaaattttaaaaaatcaaaactcataggtgagtcagaggatagtttatgcaagagacattaagcattcctgaccactggggattgttaactcatccatttgtaagactctttctgaatcctatgcccagagattctgatttaggcggtgtaggcacaatgagatacaggcatctggatttttaaaattttcacaaataactccaatacacagatgagcttgagaattgctgcattaaaacaacatttctcaaactatactgtatacactgtcacctgaggatactgttaaatgcagattctagttcactaggtctgcagcagtgatgtccaaggttctgcatttctaccaagctttcagatgatcctgatgctgctagtccagggaacacatcttgagtagccagtaccaaggccaggatctcaccacatggtgagacacacatgcatgtatctcattgtgcctgcaccgcctcaatcagaatgctgctcccaggacttaatcttctggacccagccgcagtgatttccaggaaattgcattgtgcaactgaagctgaaagccacttccctggaaggttatatattaaacttggcatcaacatatgttgaggcaccctgcctataaacttctgctaaaatatgttgtttggtttctgtcctcagaatggtttcccagttcttctccattctcttctctttacttataaagttaaactgttgattgaggatccttcttgaatagatcatatcattgacaccattatttccacaagacttgccttatacaataaatcaactctaaaaactttgacacgatgaacaagccattcatttgagaacagagaccatgtgttaaacttactctaatcctccaaattcggctcctggagctgtaaaaatagcacatggattgagagccagatgtcgtgttctgcagagagctggtttggtaataagtttcatctgtgtgaatgttcaatgccttgatgagctgagaggcctggtgtggaggaaggcgggaggaaggctaaccctttctggagaggatctttgggaatgcaaagaacaacttaaatatcaaattccacatcaaaaattagaagtgttgaatttgatatagctgttggaatgactgaatcagagcttattaccaaaccagcaaagatttgcacaaatatgggattcattgagcaaatcaagtgcagaaatctttcagacattgaacatgtgaaaggaatgtgaacatttactatatataaaacactgggctgttcataggagaaatgcaaatgtgaaccagaggtgcccccacttctggcatacaacctatagaaagaatcacatctcatctttgcacaacagatgatacttatcttactctgagcattttacatttttctaccatttaaacctcccagcagctctatgagatgctgccatgattcccagattattctgcataacactacagatttccaaatatattcccacaaattatcttatttgatcctcacaacagcccatggggtaaattattttccctttgcacacaaggaaaccaagactccaagaggttaagtaactttctcaagatcacacagctagaaagtaacagagttcaggatccagatctggccaagtacttttcccctcacactgtgatgaaaagctggcttacttgaagtgaccacattacttgtgtctgttcaggcagatttataaggctaaactcaccattttttttccttctatcacaaagtacccagcatcttcctatgacaaatgcaaatgtgctcagggcttctgagaaaccaattgttttagaagccacagggaaggaacaatgttatctttttcaaaaatctataccttattcctaatttcatgggttccaaccctctgcagattgtggaaacattgatttatagtggctgacctcatggtgctctccacttacctgcaggcaatactatctttgaaacaaacaaaaaatataaaaacttaaaaaattattctagttccaaagactagtgaaaaaaaatcagaatgaactgtaggtgtgtggctggttgcatttccccaaaacagccacatcaataaatccttcacatatgctcctcttacaaggtgactcgacactcctcctatggagagatgggtctatgtcctgcctgatgctgggcaggttttgtgactttagcagaagtgccactgcatgacttacagggctaggtcataaaaggtgacgcagttcccaccgggtctctcaggatgttcctattggaacccaaccatcaaacctgccagatgaaaaaaatcacatgataaagctctgcctagatgctccaaccaatagccagtatccagcatcagacctgcaagtggagacacatccagaggattccagccccatcactaagacatgcctctccttccagtcttttcaactgagcttcctgacatccaggaacagaagccaccttgccaaacctatgccctggccaaaccccttaccgacagaacccataatcataacaaaatgggtgttttctgtcactacattttggggtaatttgttagataaaaatagatatctattgggcagcaatacataactaataaaagatgatggagctttctatcattcattatgactttaatatcaggctttcaggataattgaatcattaaatatgaggctgttacatgtaatttaatggtgttagaagtccagacttacagtttctagtcactgtagtaaaattaaagtaataggtgtgtttgaaataaaaagtgaaaaaaactcttaaaatacagtgtgtaattgctaaccatgcatcactgaatgagcaggcacacaataaaaaacaaaacagtgaaaatgaaaatataattcaaactcagtatattatagaaaaatagagaaaatgcctttttttaatgacctaccaacggacatcaaagacacaattatagctgaagcttaattttgaaatgacaaaacacctaattacattgtattaaagcaaaatgcagaccaattggtaaactaattagaaatggatttcattttcatatcatttgttcatgcatgtaatgttattctgtttcttttccctgctcattaatatgggaaatggaaaaattacaagagttgaaaagaacttggaaaaaattcatttacagaaatatatataaatatatataatatatattacagaaatatataaatatatctaatacatatattatagaaatatataaaaatatattatatattacagaaatatatataaatatatatatttcataatatatatttcattatatatataacagaaatatatattttatatatatatataacagaaatatatattatatatatatatatatattagttctgtgtgtggattttagctgcttcaaaaacttaatgagttgccagcatctctggtttcaaaaaaactgcaattctaagagtaccttagatttgtgacctcgttgtccactccacttacctacagggaagactatctttgaaataacaaaaaatataaaaacttaaaacgttattatagttctaaagactagtaaaaaaaatcagaatgaactataactgtgtggcaggttgcatttcccaaatataatataataaacatacaattattaaacagaacaatcaactatgccattactgtgttgcaagatacctgctgtgtaactctcttgtttaactgtcttttctcagggatagagatgcatgaactttggagaaaatgggctgaagagggagacagaatcataacagtctgcttctcctttattcatctctccacttaaagccctggtattgatggatcccaatgcaaaagttccattctctttgtaatctctctttatggttttctaatactcaattaatattaagaaaatttttttcagcaacttacttctaaatttggtgtctaagatttttctctcctcagaatttacagacaaaatataaaacttttggaagatgcaagtgttcacagccttcctgacacttttacaacacttcatgccctcaaagcccaggaacaatagtaattttcttgtttattaacatttccaggaaagaatcactacttgcttctgcacctcatctctgttttcagattcgccagattccacaaagtcaaatctaaaacttacagataattcctctttcttcactaaaatgcttaaatatattaagatcctgtctttaaaaagaaagaatagagtttcatgtggctcaatagaaaagacatgttcaacaggattaatttaattaaaaagcaaaaccaaaatatgaataaaggggaagcccagttattagtcagggcctcctcttccaagtcaagagacagtaacgctgacacatggtgtccacagcaataacccgggaacatttgaagataacctgcctgtgtaaccaaacccaggttcaactgcttgcccctagaaaaccagatttgagagacaaaggttggtgggaggaaaagcaggtttatttggagagccagcaaactgacagggtggtggactattgtcttaaagcaccattttaagttaatataagttgcagcctctttttatgttaagggcagggggaaaaggagggaactgggatcaatgggtaatccatgaacatggacagctgtgtgccagcgagggtctgagtaggttgggaacttctttatccttggtcaggtcacaatgttcctgtaaatctttaacaaaacatagttgtttacatacttctttaaccctagagtttaaaaaaactacataattgctgttttgcatattatctcagtgcactaaactatcctagcttatgtgcaggaataggtaaagccccttaaacaaaaatggagttagttgtattagtccttttgctgtttcactgttatacctggacctcatgcactgagatacagattgaatagagctgggtcaagacctgagtgttggactcttgaggccacatgggtgattttaatgcccagacagggctgaggtcttgattaagtgagaggagtctttcttcccttctacagcgactacaggagttgggaagaagcaaacattctaaatgccacttttttgagcagtgttgtgttgggtatggtagtaggtatgtaagaagagggtaaaatttatatctcttaaaatttctttttttacttacagaatttttctctcccacaagctacttgccttatagtctagcttgttggggaaatgcacagagtggagcaaatcttgtttttcttttcttcattttgcatctaagatcagattcaaatctctttgaatcccagtaatataaactctgggttttggtggatctgagaaatgacaggaataataaacatttatgaaatatccagaagttgaaccaaatagcaaatttgggtgacaaagcgccacctctagtctaagcaggtgtagaggctaaaatctgcaaaaacatctaatgaaggcaaggtttgtactttattttcaggaagcagaaaagcacctgctgtttatttatgcttctctaaatgcagggttgttttgttttgttttgttttgttttgttttgttttgttttttgagacggagtctcgctctttcgcccaggccggactgcagtggcgctatcttggctcactgcaagctccgcctcctgggttcatgccattctcctgcctcagcctccagagtagctgggactacaggcgcccgccaccgcgcccggctaattttttgtatttttagtagagacggggtttcaccgtcttagccaggatggtctcgatctcctgacctcgtgatcctcctgcctcaacctcccaaagtgctgggattacaggtgtgagccacaggtgttcttaatctaaatatgagtgggctggcttttctttcaaacaagctgtattcagcagctcctggaggcttaaataacttttacaggtaaggctgtaagctaagccacaaatcaaacttaccgccattgcagtcttggctttatagttttgccttttctagaatgtcatgtagttggaatcgtgcagtatgtagcctttttagattggactttttcacttagtaatatgcatttaaggttctcctatgtcttttcacggtttgatagctcatttttgtcagcactgaatagcattccattgtgtggatgtaccatagtttattcatgcattcacctactgaagaccaccttgctttacttccaagtcttagcaattataaataaagctgctataaaaacatatgtgcaggtttttgtggggacataagttttcaacttctttgggtaaatactcaggagtgtgatcgctgggtcatatggtaagagtatgcttagctttgcacgaaaccaccaaactgtctttcaaagtggttgtaccattttgcattcccacccgtattaaacaaaagctccagtttcctcatgtcctcaccagcatttggtgttgtcagtgttctggatttagggcattttaataggtatgcagtgttatctcattgttttaatttgcatttcctggatgataagcatcttttcatatttatttaccatctgtgtatcttctttagtgaggtgtctgttcagatcttctgcccttttttaacggggttgttttcaaaactcttcaagagttcctcatatatttggaaatagtcctttatcaaatacatcctttgcaaataagaagtgtggcaacatagtaagggcagaactgcaaaatagaagaaaacctgagtctgtaatgatcatgagatgtcttaacgggctcagtatcttaactctgcatatcttttatgtgatagagaaaaatgtctgtctgcttttttgcatttttttttgaaagaaaaagaaagttgaaagaaaaaaagaggaaggaaggaaggaaggaaggaaggaaggaaggaaggaaggaaaaagcagcatggtgctattaatttccttccaggctgggaatcttcctcccctcacccagcatccaggacataagaagtaatcaatgcacatatgttgattgtgtcccaagaagaaaacgtattataaccctgtgttctttgttataacgccacagtgattatgtgagaaaataattttgagcacaacttttagtctcaataccttctcttctactctttgttcccgtggtgctttttgttttgttttagagttgtcacattttatcttggcaacagtgtggttcacatccactgttcatgctttatccccttcctctggggcaaagcctctcctctctgggtcacatttcaaggaggagctgccatcacagaaccctgaccttttggctatagctaagtgaactggagtccttccctgggatttttcagaatcttaccccaaagcctattacaagcctccattctctctctcatgtgctgttgaatagcctccaattagatgccttgtttccttccccctcctgacctcccacagactagtctcagtcagtttctccaaaactctattcagatcgtgtcaattatcttctcgattctctcttttgacttaccatctcactctggatgaaatgcaggactttcatcatttcccacgagctccctcacttcatttccagccactctcctcttgctgccatgatgttccctgtacatgctgggcacactccgaccttggggccttggcatttcctccacctagaaccttcttcccaccacccttcttcccagcttacatcagtggcttacccctcacataagtttcagcttgaatggcaccttaatagagaggccttctctaaacttctaacacaaaataatcccctgccggcactctctaggcacatagcctgctttttttattcttagcacttaacactacctgatgttcaggcatcttctttatttgttatctgtctcctcccatgaaattttagcctttacgagagaagagactgtttttgttcactgctatttctccagcattgaagatagtgtaggtcctcaacaacaaacatgttgaatggctgtcttactaacccattcccttgttgaatacttctacgctaatgttttcaaccaagtccgaagaacttctgaacggacacatttataaatgtcttaggtaataaaggaacacgaagaagctcaaaaataatcttataaaagcccttctttttaaagatgagaatctgaaacccagggtgggctgagtgaagtccctaagaacacacagctattcattgcacagttgctttggcaaaaaaataaaaaccccggctgaagctgtttaccagcctcacaaaggaaggcacccatgctgcatgtgagcctctcctgatttcaattgcatctggaaagctctgagcaggaagcaggtgcagccagctggctttgttgtctcacaggccaaagcaatatatggccttgacctaagcatgctttcaaagaagggactgtggaagccgtagaacagaaggtctcccttcccctcctcctgtctctcattatctttgactacacaaatggattcaataaatatctgtcaagtaaacaactcccaagtccccggagccagaagtgggacagcatgagggaacatgcccgaggggcacagatcctcatgcctggtttctttctcccagtttctgttccttccccaccttcttactgcatatccacactctcaagaggacagtacgttacaatgataaatgattcccaacttgtttgatagcagagctctgttctcaaggaatcccaattagaatctcatggattttttccaacacactttgagaaatgctggcataacatagaatcgtaaagtgtgaggcagtactggttggtcttttgtaggattccctccatttacaagtgagggaactgaggtctagagaggtttagtgaaaagccagaatcacccatccagttaccacagagcacactccatgtgttggcctttctactaacccaggccacctagttaattatgccaatgttgatatctggtgaagaatgaaattcaattgcatcattcccatacaatgcaattcttaagtaaggtacttgtgtagataattaaaccctgcaaagagtttatacgaatttatttaataaaacacaacttgtatagtatacttacatatatacacaatgcatgtttatatatgtatatatgtattatatatacatatatgtacatatataatatatatacatacatacatgaagatatctctgtgaagcttcagatatataaggcatacagaataatataagaaacactgtgcacagaccatccagtttaagatgtaaaacattcaaaatactggtgaatccttctatttaacccaccttagagcattatgactttaatatgaatttcctaattacccttaaggttgaatgcatttttgtatgttcattgactattcatgtttcctcttctaaaaattcataatgtaactagccaatttttctattggagtgttcatctttgttagagttctttatattttctggaaatgaatcctgatcatatacactgattatatatatatttatgtgtgtgtgtatatatatatacatatatatatatgatttttttccagactgtggcttgtctttttaatttctcattttggcctacaagaaacatagggttctagtaaatttaaatttattactttaagttttgtgatttttaactgtgagaaattcttccctactcaaagttcataaagatattcttctatagtttcttcaaaaaaacttaatgatttgctgtttatgttcaggtctttaatccaacctggaatttatatttacaacacagattgtgaaggagggatccaaatttatttttttcatatagttaagtaatgatctcatcactattgaatatttcatccttcctccatagatttgcaatgccaggtctgccatttgttgttcccatgtctgcatggacctgtttctgagtcctctcttctgtcccatcatgtggtctcctgaagccataaagctgacagcagatctgagttttctttttcctaatacaaaatcacaaaagctgggttatgggcctgcaagaccttcttttactatccccctttacttgagtgtacattcattaatttctacaataaagagttaagcaaacaggtaactacattagtaaattatcaaatgcattgctgtgttgcagttgcttataggttatagtgcttggggcctccaaatctctgttttttggttcttctctttgaaagaagggtgtcttcttctcatccaccacccattgtcctggctaacgacattcagccctaatgactgacccattgggagcatttgctgactgccctcaggctgtgctggctggttggcctttatccatgtctccctccaacaaggctcttatcccagtgtatcttgggcctggattttcctgtccatttttgcctttacactgagctccctgagagtaggaatgttgtcatgtatatttgtttatccataatctagcaaattatagacagtggcgccttatgactattggacaaaagacaaactggataagtaaataaatatgagtaaatgcttaaatattctgttaggactcacgataagtcaatagaaaaaaaatgaagaaacaagcaggttgctgactcataaatttggcccttaaagtctaatcagtgctgggatgattccaaatgctaagacccagattccatcagcagaaggactggaaaaagcccatcctaaaaagtagtgtgtctgggaatatcagccaaatatgttaactaatgcatgtgaaagcattttgcaaacataaaagccctacactcctatacaaagtaacgtagcaaaactattattaatggcaacttctggtaactcttacaatattcctcattgccttttgcatttcgaaaacagtagctttttagaaatccaagctgcatgggagaaataatcaagatcatttcctaaaaacatgaagaaaaacagagtatggatctatcaacaaagcagacagcgcaattcagcaaagagctcaaagataatatgacctgcatgccccaccttgatgacagtttgaaatgcacttaggaaaaatgaaaaccttttaacagcagtactgattattagtgaaagcatatagatagtgtctgttttgagtggtgcaacattttctttttgttttctggatcaagcacaagtagtttcatgttactgctacaagttgttttcagcaagagaggaaaaagcttccatggaataggagtcagcaagacgattctcttccccattctaccacttactattacataatatctcctctacttttcttttttttttttccttttattgctctgaagaagtagcaagatgctaattccaacagcacaaggaaaacgacctataatcttaaaaattaaataccaggaagtaatgactaacgattatctttacagagaagaatctggagcccagaaaggtgaagcgattagacacaagatcacatggccagtgagctgcaagctttcctgaccttaaatcaagtgatctatcccctcctctgtggattttttaattaatctgcattacaacccaagtagaatgagtcaagcggataatatgtaatgcctttttggaccagaaaaaaattggggcaatttggtaattggaccacagatggctttggtgataaattagcaaaagattccaggcattcttgctgctggataccatgcattagatggtgtcaccgcagaagcttaagactaaattttctacccagaagattctgggtagaattatttttcagataaaaatgcctttatttacttagcacagtatgagactacagaaggcagtgaggtgtggcatgtggttttataaaaattaataaaaagagtgtcagaggagaaggaaaagcaaaaacagatgtgtaagcgtgtataatcagaaaggcattatgtacataatcctagcagctttattcaatggtttattccatctcagtaatcatgttggtagatgagctaattgcaaatttgttaaatattcataaccaacgatttctgctaagtgacaatgaactgtcacagttgaaaggattacagatcctactgtgacatgatttcataggccgcttcctgtcattgcccccatatcctatcgatccactttctacctatgacaccgatattaaaaagtagggcaaagttgtcacaagtgcccaggtatggagaagcagacagcaagcaatggcctgtcagttcgacagcaaatgaaatactgaggctaatgcctgcaggtttcgagctcaaagctcttctccaatgcccaagattttgcaagtaggcttgaggaatacattgttcagagatctattccattctcaactcctttatgtaaacactgccctactgaagtagagaaactagaataatgcttaaaattattttcaccagtgaatttcttctgactcatagagcctcgctacttaaagttgtggtctttggaccatgggcatcagcatcacctggagtctgttagacatgcaacatcgcaggccccactccagatctgctgcctcaggatctgcattggaacaggattggcatccccaggtgactattatgcactttgaagtatagaggaaagcacttcaactttttcaagagaaacagtatattttgtgactgcagatcacatgggcatagaagtttagatgaaataatccaaagacacgggattctgatttttcaggtgatctgttaatccctgaagtgcatctggaggttagcccatcggttctgcaaatcttcataatttccatagttactgtagtaaccatggttagtatctttcctttgtccagcaggtgggaatttcggtcttttactgctctctgtcagctgtcatgacatgccacatgagttgagtttattcacaggttttccatgtgacccaaagtacattttgtaggttaatttcttggaattcttaccttttgttgggcggtttcctcattcagtcagaatctgcttacatctccacagacacttcaatctttcttatatacctgctcattgacaagcctacatttgccaatatctggttattctattcataaaacaggtttttcatttcactcttacatttgccatgacagtcatgattgatcaactaattccttgcctgtgtactcacagtcatgtgatcagtcactctttatcaaacatctaagtgccaggttcattgctcagtactgtacatatattatctctaattttctcagcaaaacagtataataagtgctgtttcctccatatacagattaaaaaatagtttcagaaagcttaagttatttgcccaaagccacacagcaaataaataatgaagtctagattaaaatacaggtgagcctgagtctaaactggtttcgtcacactctcctattactatttggcaatttgcatcattacaatcacaattttgcatttgcacaacaacattattgatccctcctagatgttataagcattgatttcagattatgttatgtccatactttttatttgaaaaagaaatggcaacaaattaacccatgttccagtaaggtctctttagattgcaagaaagagaaactcacttaaagtagcttaaataaaaaataagtgaaaatgttcagggacaagaaacccacctgggccccatggggaccaaggcaaggaacatggaggatgggagccatgagccagaaacatctcccagggccacagtgtctgtctccaacttgttctctggttgagccttcctgactcacagctacacagcacaccagcctcctctggttagaagaacactcccaactgcaagaaacagcctttttgtgtccaagtggaaagggccccactgtgaaaagcctccttttccacagcccacccaaacctgctgaagagaccacagtccctaatgagaagaagtgagacacagaagtgttttaacttttagcagactcgatccttgcttcattaaaatattataaaacccagcaccagagagctatggaggaatatctggtcctgtggtccttcacccctgggtctaaatatctgcatttgattcttgctggggttctcccacaaaaccatgacttttcaagcaggagaattctggcccaagtttcaagatattgttgtaaaattaatgtcttattgccttctttctcaatagttgatggcccccaactggttatcttgaccttagatttgtataatgaatcagaagtttgtgaaagagagatgcttaggcagctgaaatgttcatgaaactatacttgttatgctttcagatctacaggttccaagcatatcctcctaaatgttgtagccctcacaactggtcattctagaacacttctgcttaattgttttgaacatagccgagtgtgaccacctggccaactgtacacaactcttcaggtctgaaacctggcatcagtcaaatttccctctgtgttttctaatccaattatgggaagaccaagcctggtccttccttgcgtctgtctccatccctagtcaattacctgtgtctatgggcatgtttaacaaaatcccttaaaacgctgtttgttagaagccatgcaaacttgaatatttaattcagtcaacaatcattcattcatacataaaatgagcatttactcaaggtatattaatctcaacaaaaaaattacatagacctggaccctgccatgaaatcctgtggacttatgcaaggcgggaagtgacatggggtcatggaacaaacacatgtttggtagtacaaaaaagtgaactgggagaattatgtacaataagtgcatgtcagtgttaacactgaatctagaagcagacttgaaggggtccaatgtaaaaactcctttttcttttttttaatttgtaatatttatggagtaaatgagaaatttggttacatgtatatagtgcatagtggaaattttgttttcaagcatagtagttggttccatttctatgttacgagaccaccaagatgcatatttgaatagtgtattgctgttcccagtatcaatatgtcaaatgcctaactgcagagatgagtatctggtatcacagatgaaacaggctgctatagataaatgatgtttatatcaatttttcattaaaagaagtctaaacacatgaggataaagacatctcaaaaatgtctcatacacttctctgccttctaaaacatgacacattaaatatttgaaaactgagagtcaatgtgcaaaaaattgtaccttgctaaattaaaatgatgacctcaagggaaataaagaatttgctccttcactgggtttgttgttactattgttctttttaaaatggtttctatgcctttccttttgttgggagttgtaactttcttgctgctttcattgtctttatgcagttactagatttgcctctttccacttacaactggctgcttctaatctgctaagggtggaaattaggtcatagggactgttacaaacatgagtaaagtgagggataaaagactcagaattaggaactctgtgttctcttgtaaattaaaggcaggagatttagataataaacattctcatatctactgtggatattcaaaatgccttttgtatgctcattacaagtttccaactgtgttccagctagaaggtgtgaggtacgtgatagctgtactactaaggatttgccatgaagtacagtgatctataaaagaatattccagacaagcagttccttacatccacctccatgcctgaagaagggatgttagtccatagctcttagagctgcagccttgtggagaggacagtgcgggcagtgagggggatcccttcccattgcaagggggctctgttcctcctgccccaaggcaaggcagcggtgtgagcttctctcaagattcagggagatggcatcgcatgcctgagttgcagtctggtcgtgcagcagatctgtcacttacttactagagctgggaaagaacagaattggagagagatgagaggacagaagggcagtctccctcccactggttgctgtgtcagcaagaagcagatttcctatcagtcaagtggacagtaaagaaagtaactggtctacaagaaggctgccgcctgcagtgtacagctaccagtggcaagatctgagcaggtacagagaaactgagctgggcagggagccctgtgtgaaggacaacacagcaggggagacgtagaccatgtggtggacaacaagggccagtcagtactagcagcagaagtattttttcttgaacacgcactgatttttttattcagatcttcaaaccctttgtttttaaataagaaacaaatccacatggttttaaatttaaaagtttataaagggaatagtatgaaaaataagccctgccttctaccccatccccaaccatccagttccccaagccccctctcaataggcaaatactgtcactaacttcttgtgcatcttttcagaaatattcaaaacatcctcaagcatatgcataatataagtaagtatgtggatatgggggagtctgtattttttaccagtggtagcatacttcacacatgtttagtactttgcattttttcatttaaagcaacatcttgtcaacctttatgtatcagaaatgacataatatcccattttatgggtatgccataatttatttaatcagctctccattgatgggtatttgggtcatttccagtcttgaattatgacaaacaatgctgccatgtataaccttgacgtgataggctgaaaaatgatcccccaaagataatagtcccgatccctggatcctatgaatgttactggatatgacaaagattttgcagttgtgattaaattaaggttcttgaggtgaggcaattactctatattacccaggttggccctatgcaatcacatgtatccttataagagagagacagaggggaatacatggaagaagaagatgtgggagcagagtgagaagagatttgaagatgctattgcctcaagaccacagatgccagaaacccccagaagtgggaagaggcaaggcacagattctcccctagagtctccagatgacgtgtggccatgctgacaccttggttttgacccagtgatgctaatttcagacttccatttcattccatttcattcaaatatccatttgcatccattgccatttgtctgttgtggttttgatactttgtctaatcaatttacaggaatggtcatgtgttcaggtaactaactctttgcatcttagttgcaatttgttttttgtttgtttggtgtctttttttttttgagacgaagcttccctctcatttcccaagctggaatgcagtggcatgatctcggctcaccacaacatccacctcccgggttcaagagattcacctgcctcagcctctcaagtatctgagattacaggtgtccacgacaacgccagcgaactttttgtatttttagtagaaatggggtttcaccatgttggccaggctggtctcgaactcctgaccacaggtgatccacccacctcggcctcccaaagtgctgggattacaggacaatttgtttttatttatcatttggcttttgactttgcttgtcataatttttaccacacaagattttaaaatttttatgtagttaaattaatacttcatagctgctagctgtggggtcatgatttgaaagtcttccctacatcaagattttaagtattttttcctaattattcatgttttcagttttcatatttaaacctttgatgctttgaaaattcattttggtgtaagatgtaagaggtgaattaaatgtaattgtttttccactcatctatcctggtatcctaatactattcaaaatgattcatctttttaacctttttatgtatgaaatgtgtatatgtatttggatctatttctagactttctctttggccaaagggatctttctgtctacacgttttcaaataataaaataaatcatgctgtaaaacgtgaattctgagttcctgtgtgctactctcacagaaaggaaacaaaagaactagtgaacactgactctgcagctgatcatctgagaaaccatgtcgggatccatcaaggcagtgggggacacagcagagaggagccacgccgggcagcagcttgtatgagctcagcacagagtgaggagaatttctccgaatgagtgagtgagtgagtgactgagtgagtgagtgagtgaatgagtgcccctgggggatgcgtgctctccacggggactagtgcaagactgggaatgggagaatcccctggcccttccacagcccccaccaccacacggcttctagactgaggcagagagccacctagacattgtgcgggggtaactctcaagacaaaaagggacctctacaagccttgggccccacagcagaccagcaccagcaccaagccccaatagaggtcacagtcatggtacccgggagcagtagggttgctctaccacccctcactgaacagggcttactgccaggcttctggtccagcaatcctgcttctgcctgaactcagccagcagctgcagcttcctgctgtcctgggaagtatccggatgtcaaagcaggtgactccacccacccctgtcactgacagccagacaggcaatgcctgctagcgttgctggtccaaccgtcccacttctacctgaactcaactggcaggcacagcctctgttgtcctggaaaacacctagacagcaggaaagaccaccacacccaccctcagcactggcagccaggagcacaatgcctgctagagcttccagcccagcagtcctctttcttcctgagtttgctaagggatgtagcctcctgttgccccagaaacaccaggatggcagggcaggtaaccccacccaccccacctctcttagccagataggcaacacctactagagccttaagcccaggggtcccacttctgcctgaactctgcagcaggtgcaaccccatgttcccttgggaagcattcagacagtagattaggaccaacctggctaggatacagcctgtctgccaactacactccttgcctgaggaagccttgtggcccagaacacccaacaaaagaaacatgggcacagagacagtaattgaatggggcaccttcaagacccaggagcagactagaataaaagccagttgagtgaacccaccttataccacaatcaaatccccaaggacatccaaaacaataaaagcaaaaaaacaatccaaaagacagcaacttcaaagactgaaggaacatcagcccacacagatgagaaagaaccagtgcaagaagtcaaggaattcaaaaagccagagagtcttcttatttccaaacaaccacacttgttcccagcaatggtccttaaccaagctgaaatgttagaaacagaattcagattatggataggaataaagatcattaacattcaggagaaagttgaaacccaatccaaggaatctaaggggtacaataaaatgacacaagagataaaagataaaatggccattttaagaaagaaccagattaaaccaagagagctgaaaaattaactgagagttgaaaaattcactttaagagtttcataatacattgcaagtattaacagcaaaactggtgaagctgaggaaataatctcagagcttgaagactggtctccaaaataactaagtcagaaaaaataaaataaaataataaagaagaatgaacaaaacctctgagaaatatgggattatgtgaaaagaccaaatttatgactcactggtgttattgagagggagagaaagcaagcaacttggaaagcatatttgaagatattatacatgaaaatttccccaatctcactagagaggccaacatttaaattcaggaaatgcaaataacccctgtaagatactacacaagacgaccatccccaagacaaatagtcctcagatcctccaaggtcaaaatgaaagaaaaattgttaaaggcagctagagagaagggtttggtcacctataaaaggaatcttatcaggctaacagcagatctttcagcagaaactctacaagctggaagaaatttggggcctatactcagtatttgtaaggaaaagaaattccaaccaagaatttcatatctagacaaactaagcttcataaggaaagagtaataaaattctttttagaaaagcaaatgctaagagaatttgttaccacctgactgccttacaagaagtccttaagggagtgctgaatgtggaaaggaatgattgataccagtaactgcaaaaacatacttaaatacatatagcattgacaccataaacacacacacacacacacacacaataaaatcatccaaataaccagctaagaacatgaagacaggatcaaacccacacatatcaatattaaccttgaacataaatgggctaaattcccccaattaaaaggcaagtttgataaagaagcaagacccaactgtatgctctctagaagagactcgtctcacacatatggatatgaatgatatccataggttcaaagtaaagagatggagaaaaatctaccaagtaaatggaaatcaaaaagaagcagggttttctcttctaatttcagacaaaacagactttaagccaataagattgataaagacaaagaagggcattacataatggtaaagagttcaattcaataagaagatctaactatcctaaatatatatccacccaacactacagcacccagattcagaaagcaaattcttaagagacctacaaagagacttagataaccacataataatagtgagagacttcagcactcaactgataatacgaggcagatcatcaaggcagaaaactgatgaagatattcaggacatgagctcaacattttaccaaatgagcccaacagatatctacagaattctccaccccaaaacaaaagaatatacattcttctcatctgcacatggcacatactataaaatagaccacacaatcggccataaaacaatcctcagcaaactccaaaaaactaaaatcataccaaactcactctcagaccacagtacaacacaaatagaaatcaataccaagaaaatcactcaaaaccatacaagtaaataaaaattaaacaacctgctcctgaatgacttttgggtaagcaataaaattaaggtagaaatcaagaaattctttgaaattaataagaataacaatgatacaacataccagaatctctgggacacagataaagaatgttatgaggaaagttcatagtgctaaaggcccacatcaaaaagttagaaaggtctcaatttaacaacctaatgtcacatctagaggaaccagaaaaataagagcaaaccaactgaaagctagtgaaagaaaagaaataaccaaaatcaaggcttaactgaaggaaactgagatgtcaaaaaccatacaaaagatcaacaaatccaggatatgaatcttttaaagaataaataagattgacaggctgctagctagactaataaagaataaaagaggctgggcatggtggctcatgcatgtaatcccagcactttgggaggccgaggtgggtggatcacaagatcaggagttcaagaccagtctagccaatatggtgaaaccccatctctactaaaaatacaaaaattagctggacatggtggcacatgcctgtagtcccagctacttggaaggctgaggcaggaggatcacttgaacccgggaggcagaggttgcagtgtgccaagattgcgccactgcactccagcctgggtgacagagcaagactccttctcaaaaacaaacaaacaaaccaacaataaaagagagaatatccaaataaacgcaatcagaaacaacaaaggggacattactattgacacaatagaaatacaaaaaaaaaaaaaacttcagaaactactctgaacacctctatgcatgtgaactggaaaacccagaaaaaatggataaattcctggaaacatacagtcttccaagattgaaccagaaaatactgaatacccgaacagaccaataacaagttctgaaactgaatcagtaataaaaagcttgccagacagaaaaagcccagaaccagacagatttacagccatattttaccagatatataaaaaggagttggtacaatttctactgaaaccattcccaaaaattaaggagcggagtctcctccttaacttattatataagaccagcatcatcctgataccaaaacctggcagagacacaacaaaaaaagaaaacttcaggccaatatccttgataaacatagatgcaaaaatcctcaaaaaacactaccgaatcaaatccagcaacacattgaaaagctaatccaccaccatcatgtaggctttatcactgggatgcaaggttggttcaacatatgaaaatcaataaatgtgattcaccacataaacagaactataaacaaaggccaataaccatctcaatagattcagaaaaagattttgataaaattcaacatcccttcatactaaaaatcctcagcaaactaggcattgaaggaacatgcttcaaaataataagagccatctatgaaaaatccacagccaacatcatactgaatgggcaaaatctggaagcattccccttgagaacaggaataagacaaggatgcccactctcaccactcctatttaacatagtactggtagtcctaaccagagcaaccaggtaagagaaagaaataaaagaagaaatgaaaagaatccaaataggaagggaggaagtcgaactatctctatttgcatgtgatatgattctatacctagaaaaccccatagtctgcctgaaagctcctagaagtgataaacaacttaagatttcaggatacaaaatcaatgtacaaaaaacagtagcatttctatacattaacaacgttcaagctgagagccaaatcaagaatttaaccccattcacaatagccacaaaaagaataaaataaccaggaatatagctagccagggaggttaaaggtctctacaacaagaactgcaaaacactgctcaaagaaatcagagatcgggcgtagtgtcgggcgcctgtagtcccagctacttgggaggctgaggcaggagaatggcgtgaacccgggaggcggagcttgcagtgagccgagatcccgccactgcactccagcctgggcgacagagcgagactccgtctcaaaaaaaaaaaaaaaaaaaaaaaaaaaaaaaaaaaaaaaaaatcagagatgacagaaacaaataaaaaaaatttcatgctcatagataggaagaatcaagatttttaaaatggccacattacccaaagcaatttacagatttagtgctattcctatcaaactaccaatgacattcctcacagaattagaaaaaaaaaactattttaaaaatcacatggaaccaaaaaaggcttgaatagttaaggtaattctaagccaaaaaaaaaaaaaaaacaaagctggaagaatcatgttacccaacttcaaactatcttacaaggctatagtaatcaaaacagcatggtactggtgcaaaaacactcacatagaccaatggaaaagaatagagaacccagaaataaacctgcac
